United States Patent Application Publication US 2023/0212319 A1 - sequence listing, part 12

SEQ ID NO: 21820 - DNA, 2550 bp, Artificial Sequence
  Synthetic Polynucleotide
atggccttaccagtgaccgccttgctcctgccgctggccttgctgctccacgccgccaggccggacatccagatgacacagagccctagcagcctgtctgccagcgtgggagacagagtgaccatcacatgcaaggccagcgaccacatcaacaactggctggcctggtatcagcagaagcctggacaggcccctaagctgctgatctacggcgctaccacactggaaacaggcgtgcccagcagattttctggcagcggctctggcaccgactacaccctgacaatatccagcctccagcctgaggacttcgccacctactactgtcagcagagctggaacaccccttggacattcggccagggcaccaagctggaaatcaagagactcgaggacctgaagaacgtgttcccacctgaggtggccgtgttcgagcctagcgaggccgagatcagccacacccagaaagccaccctcgtgtgcctggctaccggcttctaccccgaccatgtggaactgtcttggtgggtcaacggcaaagaggtgcacagcggcgtgtgtaccgacccccagccactgaaagaacagcccgccctgaacgacagccggtactgcctgagcagcagactgagagtgtccgccaccttctggcagaacccccggaaccacttcagatgccaggtgcagttctacggcctgagcgagaacgacgagtggacccaggacagagccaagcccgtgacccagatcgtgtctgccgaagcctggggcagagccgattgcggctttaccagcgagagctaccagcagggcgtgctgagcgccaccatcctgtacgagatcctgctgggcaaggccaccctgtacgccgtgctggtgtctgccctggtgctgatggctatggtcaagcggaaggacagccggggaagggccaagcgatctggatctggagcaacaaacttctcactactcaaacaagcaggtgacgtggaggagaatcccgggcctactagtatggactggatttggcgcatccttttccttgtcggcgctgctaccggcgcgcattccttcgaacaagttcagcttcaacagcctggcgctgagctggtcaaacctggcgcttctgtgaagatgagctgcaaagccagcggctacgccttcagcagctactggatcaactggatgaagcagaaacccggccagggactcgaatggatcggccaaatctatcccggcgacggcgacaccaactacaacggcaagttcaagggcagagccacactgaccgccgatacctctagcagcacagcctacatgcagctgagcagcctgaccagcgaagatagcgccgtgtacttctgtgcccggtccatcacaacagtcgtgggctgcgctatggactattggggccagggaacaagcgtgaccgtgtctagtacgcgtgccgtgtaccagctgcgggatagcaagagcagcgacaagagcgtgtgtctgttcaccgacttcgacagccagaccaacgtgtcccagagcaaggactccgacgtgtacatcaccgataagtgcgtgctggacatgcggagcatggacttcaagagcaactccgccgtggcctggtccaacaagtccgatttcgcctgcgccaacgccttcaacaacagcattatccccgaggacacattcttcccaagccccgagagcagctgcgacgtgaagctggtggaaaagagcttcgagacagacaccaacctgaacttccagaacctgagcgtgatcggcttcagaatcctgctgctgaaagtggccggctttaacctgctgatgaccctgcggctgtggtccagccgcgccaagagaagcggatctggcgtgaagcagaccctgaatttcgacctgctgaagctggctggcgacgtggaatccaacccaggcccttctagaggccatatgaccgagtacaagcccacggtgcgcctcgccacccgcgacgacgtccccagggccgtacgcaccctcgccgccgcgttcgccgactaccccgccacgcgccacaccgtcgatccggaccgccacatcgagcgggtcaccgagctgcaagaactcttcctcacgcgcgtcgggctcgacatcggcaaggtgtgggtcgcggacgacggcgccgcggtggcggtctggaccacgccggagagcgtcgaagcgggggcggtgttcgccgagatcggcccgcgcatggccgagttgagcggttcccggctggccgcgcagcaacagatggaaggcctcctggcgccgcaccggcccaaggagcccgcgtggttcctggccaccgtcggcgtctcgcccgaccaccagggcaagggtctgggcagcgccgtcgtgctccccggagtggaggcggccgagcgcgccggggtgcccgccttcctggagacctccgcgccccgcaacctccccttctacgagcggctcggcttcaccgtcaccgccgacgtcgaggtgcccgaaggaccgcgcacctggtgcatgacccgcaagcccggtgcctga

SEQ ID NO: 21821 - DNA, 2529 bp, Artificial Sequence
  Synthetic Polynucleotide
atggccttaccagtgaccgccttgctcctgccgctggccttgctgctccacgccgccaggccggacatccagatgacacagagccctagcagcctgtctgccagcgtgggagacagagtgaccatcacatgcaaggccagcgaccacatcaacaactggctggcctggtatcagcagaagcctggacaggcccctaagctgctgatctacggcgctaccacactggaaacaggcgtgcccagcagattttctggcagcggctctggcaccgactacaccctgacaatatccagcctccagcctgaggacttcgccacctactactgtcagcagagctggaacaccccttggacattcggccagggcaccaagctggaaatcaagagactcgaggacctgaagaacgtgttcccacctgaggtggccgtgttcgagcctagcgaggccgagatcagccacacccagaaagccaccctcgtgtgcctggctaccggcttctaccccgaccatgtggaactgtcttggtgggtcaacggcaaagaggtgcacagcggcgtgtgtaccgacccccagccactgaaagaacagcccgccctgaacgacagccggtactgcctgagcagcagactgagagtgtccgccaccttctggcagaacccccggaaccacttcagatgccaggtgcagttctacggcctgagcgagaacgacgagtggacccaggacagagccaagcccgtgacccagatcgtgtctgccgaagcctggggcagagccgattgcggctttaccagcgagagctaccagcagggcgtgctgagcgccaccatcctgtacgagatcctgctgggcaaggccaccctgtacgccgtgctggtgtctgccctggtgctgatggctatggtcaagcggaaggacagccggggaagggccaagcgatctggatctggagcaacaaacttctcactactcaaacaagcaggtgacgtggaggagaatcccgggcctactagtatggactggatttggcgcatccttttccttgtcggcgctgctaccggcgcgcattccttcgaacaagttcagcttcaacagcctggcgctgagctggtcaaacctggcgcttctgtgaagatgagctgcaaagccagcggctacgccttcagcagctactggatcaactggatgaagcagaaacccggccagggactcgaatggatcggccaaatctatcccggcgacggcgacaccaactacaacggcaagttcaagggcagagccacactgaccgccgatacctctagcagcacagcctacatgcagctgagcagcctgaccagcgaagatagcgccgtgtacttctgtgcccggtccatcacaacagtcgtgggctgcgctatggactattggggccagggaacaagcgtgaccgtgtctagtacgcgtagcaagagcagcgacaagagcgtgtgtctgttcaccgacttcgacagccagaccaacgtgtcccagagcaaggactccgacgtgtacatcaccgataagtgcgtgctggacatgcggagcatggacttcaagagcaactccgccgtggcctggtccaacaagtccgatttcgcctgcgccaacgccttcaacaacagcattatccccgaggacacattcttcccaagccccgagagcagctgcgacgtgaagctggtggaaaagagcttcgagacagacaccaacctgaacttccagaacctgagcgtgatcggcttcagaatcctgctgctgaaagtggccggctttaacctgctgatgaccctgcggctgtggtccagccgcgccaagagaagcggatctggcgtgaagcagaccctgaatttcgacctgctgaagctggctggcgacgtggaatccaacccaggcccttctagaggccatatgaccgagtacaagcccacggtgcgcctcgccacccgcgacgacgtccccagggccgtacgcaccctcgccgccgcgttcgccgactaccccgccacgcgccacaccgtcgatccggaccgccacatcgagcgggtcaccgagctgcaagaactcttcctcacgcgcgtcgggctcgacatcggcaaggtgtgggtcgcggacgacggcgccgcggtggcggtctggaccacgccggagagcgtcgaagcgggggcggtgttcgccgagatcggcccgcgcatggccgagttgagcggttcccggctggccgcgcagcaacagatggaaggcctcctggcgccgcaccggcccaaggagcccgcgtggttcctggccaccgtcggcgtctcgcccgaccaccagggcaagggtctgggcagcgccgtcgtgctccccggagtggaggcggccgagcgcgccggggtgcccgccttcctggagacctccgcgccccgcaacctccccttctacgagcggctcggcttcaccgtcaccgccgacgtcgaggtgcccgaaggaccgcgcacctggtgcatgacccgcaagcccggtgcctga

SEQ ID NO: 21822 - DNA, 2511 bp, Artificial Sequence
  Synthetic Polynucleotide
atggccttaccagtgaccgccttgctcctgccgctggccttgctgctccacgccgccaggccggacatccagatgacacagagccctagcagcctgtctgccagcgtgggagacagagtgaccatcacatgcaaggccagcgaccacatcaacaactggctggcctggtatcagcagaagcctggacaggcccctaagctgctgatctacggcgctaccacactggaaacaggcgtgcccagcagattttctggcagcggctctggcaccgactacaccctgacaatatccagcctccagcctgaggacttcgccacctactactgtcagcagagctggaacaccccttggacattcggccagggcaccaagctggaaatcaagagactcgaggtggccgtgttcgagcctagcgaggccgagatcagccacacccagaaagccaccctcgtgtgcctggctaccggcttctaccccgaccatgtggaactgtcttggtgggtcaacggcaaagaggtgcacagcggcgtgtgtaccgacccccagccactgaaagaacagcccgccctgaacgacagccggtactgcctgagcagcagactgagagtgtccgccaccttctggcagaacccccggaaccacttcagatgccaggtgcagttctacggcctgagcgagaacgacgagtggacccaggacagagccaagcccgtgacccagatcgtgtctgccgaagcctggggcagagccgattgcggctttaccagcgagagctaccagcagggcgtgctgagcgccaccatcctgtacgagatcctgctgggcaaggccaccctgtacgccgtgctggtgtctgccctggtgctgatggctatggtcaagcggaaggacagccggggaagggccaagcgatctggatctggagcaacaaacttctcactactcaaacaagcaggtgacgtggaggagaatcccgggcctactagtatggactggatttggcgcatccttttccttgtcggcgctgctaccggcgcgcattccttcgaacaagttcagcttcaacagcctggcgctgagctggtcaaacctggcgcttctgtgaagatgagctgcaaagccagcggctacgccttcagcagctactggatcaactggatgaagcagaaacccggccagggactcgaatggatcggccaaatctatcccggcgacggcgacaccaactacaacggcaagttcaagggcagagccacactgaccgccgatacctctagcagcacagcctacatgcagctgagcagcctgaccagcgaagatagcgccgtgtacttctgtgcccggtccatcacaacagtcgtgggctgcgctatggactattggggccagggaacaagcgtgaccgtgtctagtacgcgtctgcgggatagcaagagcagcgacaagagcgtgtgtctgttcaccgacttcgacagccagaccaacgtgtcccagagcaaggactccgacgtgtacatcaccgataagtgcgtgctggacatgcggagcatggacttcaagagcaactccgccgtggcctggtccaacaagtccgatttcgcctgcgccaacgccttcaacaacagcattatccccgaggacacattcttcccaagccccgagagcagctgcgacgtgaagctggtggaaaagagcttcgagacagacaccaacctgaacttccagaacctgagcgtgatcggcttcagaatcctgctgctgaaagtggccggctttaacctgctgatgaccctgcggctgtggtccagccgcgccaagagaagcggatctggcgtgaagcagaccctgaatttcgacctgctgaagctggctggcgacgtggaatccaacccaggcccttctagaggccatatgaccgagtacaagcccacggtgcgcctcgccacccgcgacgacgtccccagggccgtacgcaccctcgccgccgcgttcgccgactaccccgccacgcgccacaccgtcgatccggaccgccacatcgagcgggtcaccgagctgcaagaactcttcctcacgcgcgtcgggctcgacatcggcaaggtgtgggtcgcggacgacggcgccgcggtggcggtctggaccacgccggagagcgtcgaagcgggggcggtgttcgccgagatcggcccgcgcatggccgagttgagcggttcccggctggccgcgcagcaacagatggaaggcctcctggcgccgcaccggcccaaggagcccgcgtggttcctggccaccgtcggcgtctcgcccgaccaccagggcaagggtctgggcagcgccgtcgtgctccccggagtggaggcggccgagcgcgccggggtgcccgccttcctggagacctccgcgccccgcaacctccccttctacgagcggctcggcttcaccgtcaccgccgacgtcgaggtgcccgaaggaccgcgcacctggtgcatgacccgcaagcccggtgcctga

SEQ ID NO: 21823 - DNA, 2544 bp, Artificial Sequence
  Synthetic Polynucleotide
atggccttaccagtgaccgccttgctcctgccgctggccttgctgctccacgccgccaggccggacatccagatgacacagagccctagcagcctgtctgccagcgtgggagacagagtgaccatcacatgcaaggccagcgaccacatcaacaactggctggcctggtatcagcagaagcctggacaggcccctaagctgctgatctacggcgctaccacactggaaacaggcgtgcccagcagattttctggcagcggctctggcaccgactacaccctgacaatatccagcctccagcctgaggacttcgccacctactactgtcagcagagctggaacaccccttggacattcggccagggcaccaagctggaaatcaagagactcgagaagaacgtgttcccacctgaggtggccgtgttcgagcctagcgaggccgagatcagccacacccagaaagccaccctcgtgtgcctggctaccggcttctaccccgaccatgtggaactgtcttggtgggtcaacggcaaagaggtgcacagcggcgtgtgtaccgacccccagccactgaaagaacagcccgccctgaacgacagccggtactgcctgagcagcagactgagagtgtccgccaccttctggcagaacccccggaaccacttcagatgccaggtgcagttctacggcctgagcgagaacgacgagtggacccaggacagagccaagcccgtgacccagatcgtgtctgccgaagcctggggcagagccgattgcggctttaccagcgagagctaccagcagggcgtgctgagcgccaccatcctgtacgagatcctgctgggcaaggccaccctgtacgccgtgctggtgtctgccctggtgctgatggctatggtcaagcggaaggacagccggggaagggccaagcgatctggatctggagcaacaaacttctcactactcaaacaagcaggtgacgtggaggagaatcccgggcctactagtatggactggatttggcgcatccttttccttgtcggcgctgctaccggcgcgcattccttcgaacaagttcagcttcaacagcctggcgctgagctggtcaaacctggcgcttctgtgaagatgagctgcaaagccagcggctacgccttcagcagctactggatcaactggatgaagcagaaacccggccagggactcgaatggatcggccaaatctatcccggcgacggcgacaccaactacaacggcaagttcaagggcagagccacactgaccgccgatacctctagcagcacagcctacatgcagctgagcagcctgaccagcgaagatagcgccgtgtacttctgtgcccggtccatcacaacagtcgtgggctgcgctatggactattggggccagggaacaagcgtgaccgtgtctagtacgcgtgccgtgtaccagctgcgggatagcaagagcagcgacaagagcgtgtgtctgttcaccgacttcgacagccagaccaacgtgtcccagagcaaggactccgacgtgtacatcaccgataagtgcgtgctggacatgcggagcatggacttcaagagcaactccgccgtggcctggtccaacaagtccgatttcgcctgcgccaacgccttcaacaacagcattatccccgaggacacattcttcccaagccccgagagcagctgcgacgtgaagctggtggaaaagagcttcgagacagacaccaacctgaacttccagaacctgagcgtgatcggcttcagaatcctgctgctgaaagtggccggctttaacctgctgatgaccctgcggctgtggtccagccgcgccaagagaagcggatctggcgtgaagcagaccctgaatttcgacctgctgaagctggctggcgacgtggaatccaacccaggcccttctagaggccatatgaccgagtacaagcccacggtgcgcctcgccacccgcgacgacgtccccagggccgtacgcaccctcgccgccgcgttcgccgactaccccgccacgcgccacaccgtcgatccggaccgccacatcgagcgggtcaccgagctgcaagaactcttcctcacgcgcgtcgggctcgacatcggcaaggtgtgggtcgcggacgacggcgccgcggtggcggtctggaccacgccggagagcgtcgaagcgggggcggtgttcgccgagatcggcccgcgcatggccgagttgagcggttcccggctggccgcgcagcaacagatggaaggcctcctggcgccgcaccggcccaaggagcccgcgtggttcctggccaccgtcggcgtctcgcccgaccaccagggcaagggtctgggcagcgccgtcgtgctccccggagtggaggcggccgagcgcgccggggtgcccgccttcctggagacctccgcgccccgcaacctccccttctacgagcggctcggcttcaccgtcaccgccgacgtcgaggtgcccgaaggaccgcgcacctggtgcatgacccgcaagcccggtgcctga

SEQ ID NO: 21824 - DNA, 2541 bp, Artificial Sequence
  Synthetic Polynucleotide
atggccttaccagtgaccgccttgctcctgccgctggccttgctgctccacgccgccaggccggacatccagatgacacagagccctagcagcctgtctgccagcgtgggagacagagtgaccatcacatgcaaggccagcgaccacatcaacaactggctggcctggtatcagcagaagcctggacaggcccctaagctgctgatctacggcgctaccacactggaaacaggcgtgcccagcagattttctggcagcggctctggcaccgactacaccctgacaatatccagcctccagcctgaggacttcgccacctactactgtcagcagagctggaacaccccttggacattcggccagggcaccaagctggaaatcaagagactcgagaacgtgttcccacctgaggtggccgtgttcgagcctagcgaggccgagatcagccacacccagaaagccaccctcgtgtgcctggctaccggcttctaccccgaccatgtggaactgtcttggtgggtcaacggcaaagaggtgcacagcggcgtgtgtaccgacccccagccactgaaagaacagcccgccctgaacgacagccggtactgcctgagcagcagactgagagtgtccgccaccttctggcagaacccccggaaccacttcagatgccaggtgcagttctacggcctgagcgagaacgacgagtggacccaggacagagccaagcccgtgacccagatcgtgtctgccgaagcctggggcagagccgattgcggctttaccagcgagagctaccagcagggcgtgctgagcgccaccatcctgtacgagatcctgctgggcaaggccaccctgtacgccgtgctggtgtctgccctggtgctgatggctatggtcaagcggaaggacagccggggaagggccaagcgatctggatctggagcaacaaacttctcactactcaaacaagcaggtgacgtggaggagaatcccgggcctactagtatggactggatttggcgcatccttttccttgtcggcgctgctaccggcgcgcattccttcgaacaagttcagcttcaacagcctggcgctgagctggtcaaacctggcgcttctgtgaagatgagctgcaaagccagcggctacgccttcagcagctactggatcaactggatgaagcagaaacccggccagggactcgaatggatcggccaaatctatcccggcgacggcgacaccaactacaacggcaagttcaagggcagagccacactgaccgccgatacctctagcagcacagcctacatgcagctgagcagcctgaccagcgaagatagcgccgtgtacttctgtgcccggtccatcacaacagtcgtgggctgcgctatggactattggggccagggaacaagcgtgaccgtgtctagtacgcgtgccgtgtaccagctgcgggatagcaagagcagcgacaagagcgtgtgtctgttcaccgacttcgacagccagaccaacgtgtcccagagcaaggactccgacgtgtacatcaccgataagtgcgtgctggacatgcggagcatggacttcaagagcaactccgccgtggcctggtccaacaagtccgatttcgcctgcgccaacgccttcaacaacagcattatccccgaggacacattcttcccaagccccgagagcagctgcgacgtgaagctggtggaaaagagcttcgagacagacaccaacctgaacttccagaacctgagcgtgatcggcttcagaatcctgctgctgaaagtggccggctttaacctgctgatgaccctgcggctgtggtccagccgcgccaagagaagcggatctggcgtgaagcagaccctgaatttcgacctgctgaagctggctggcgacgtggaatccaacccaggcccttctagaggccatatgaccgagtacaagcccacggtgcgcctcgccacccgcgacgacgtccccagggccgtacgcaccctcgccgccgcgttcgccgactaccccgccacgcgccacaccgtcgatccggaccgccacatcgagcgggtcaccgagctgcaagaactcttcctcacgcgcgtcgggctcgacatcggcaaggtgtgggtcgcggacgacggcgccgcggtggcggtctggaccacgccggagagcgtcgaagcgggggcggtgttcgccgagatcggcccgcgcatggccgagttgagcggttcccggctggccgcgcagcaacagatggaaggcctcctggcgccgcaccggcccaaggagcccgcgtggttcctggccaccgtcggcgtctcgcccgaccaccagggcaagggtctgggcagcgccgtcgtgctccccggagtggaggcggccgagcgcgccggggtgcccgccttcctggagacctccgcgccccgcaacctccccttctacgagcggctcggcttcaccgtcaccgccgacgtcgaggtgcccgaaggaccgcgcacctggtgcatgacccgcaagcccggtgcctga

SEQ ID NO: 21825 - DNA, 2535 bp, Artificial Sequence
  Synthetic Polynucleotide
atggccttaccagtgaccgccttgctcctgccgctggccttgctgctccacgccgccaggccggacatccagatgacacagagccctagcagcctgtctgccagcgtgggagacagagtgaccatcacatgcaaggccagcgaccacatcaacaactggctggcctggtatcagcagaagcctggacaggcccctaagctgctgatctacggcgctaccacactggaaacaggcgtgcccagcagattttctggcagcggctctggcaccgactacaccctgacaatatccagcctccagcctgaggacttcgccacctactactgtcagcagagctggaacaccccttggacattcggccagggcaccaagctggaaatcaagagactcgagttcccacctgaggtggccgtgttcgagcctagcgaggccgagatcagccacacccagaaagccaccctcgtgtgcctggctaccggcttctaccccgaccatgtggaactgtcttggtgggtcaacggcaaagaggtgcacagcggcgtgtgtaccgacccccagccactgaaagaacagcccgccctgaacgacagccggtactgcctgagcagcagactgagagtgtccgccaccttctggcagaacccccggaaccacttcagatgccaggtgcagttctacggcctgagcgagaacgacgagtggacccaggacagagccaagcccgtgacccagatcgtgtctgccgaagcctggggcagagccgattgcggctttaccagcgagagctaccagcagggcgtgctgagcgccaccatcctgtacgagatcctgctgggcaaggccaccctgtacgccgtgctggtgtctgccctggtgctgatggctatggtcaagcggaaggacagccggggaagggccaagcgatctggatctggagcaacaaacttctcactactcaaacaagcaggtgacgtggaggagaatcccgggcctactagtatggactggatttggcgcatccttttccttgtcggcgctgctaccggcgcgcattccttcgaacaagttcagcttcaacagcctggcgctgagctggtcaaacctggcgcttctgtgaagatgagctgcaaagccagcggctacgccttcagcagctactggatcaactggatgaagcagaaacccggccagggactcgaatggatcggccaaatctatcccggcgacggcgacaccaactacaacggcaagttcaagggcagagccacactgaccgccgatacctctagcagcacagcctacatgcagctgagcagcctgaccagcgaagatagcgccgtgtacttctgtgcccggtccatcacaacagtcgtgggctgcgctatggactattggggccagggaacaagcgtgaccgtgtctagtacgcgtgccgtgtaccagctgcgggatagcaagagcagcgacaagagcgtgtgtctgttcaccgacttcgacagccagaccaacgtgtcccagagcaaggactccgacgtgtacatcaccgataagtgcgtgctggacatgcggagcatggacttcaagagcaactccgccgtggcctggtccaacaagtccgatttcgcctgcgccaacgccttcaacaacagcattatccccgaggacacattcttcccaagccccgagagcagctgcgacgtgaagctggtggaaaagagcttcgagacagacaccaacctgaacttccagaacctgagcgtgatcggcttcagaatcctgctgctgaaagtggccggctttaacctgctgatgaccctgcggctgtggtccagccgcgccaagagaagcggatctggcgtgaagcagaccctgaatttcgacctgctgaagctggctggcgacgtggaatccaacccaggcccttctagaggccatatgaccgagtacaagcccacggtgcgcctcgccacccgcgacgacgtccccagggccgtacgcaccctcgccgccgcgttcgccgactaccccgccacgcgccacaccgtcgatccggaccgccacatcgagcgggtcaccgagctgcaagaactcttcctcacgcgcgtcgggctcgacatcggcaaggtgtgggtcgcggacgacggcgccgcggtggcggtctggaccacgccggagagcgtcgaagcgggggcggtgttcgccgagatcggcccgcgcatggccgagttgagcggttcccggctggccgcgcagcaacagatggaaggcctcctggcgccgcaccggcccaaggagcccgcgtggttcctggccaccgtcggcgtctcgcccgaccaccagggcaagggtctgggcagcgccgtcgtgctccccggagtggaggcggccgagcgcgccggggtgcccgccttcctggagacctccgcgccccgcaacctccccttctacgagcggctcggcttcaccgtcaccgccgacgtcgaggtgcccgaaggaccgcgcacctggtgcatgacccgcaagcccggtgcctga

SEQ ID NO: 21826 - DNA, 2466 bp, Artificial Sequence
  Synthetic Polynucleotide
atggccttaccagtgaccgccttgctcctgccgctggccttgctgctccacgccgccaggccggacatccagatgacacagagccctagcagcctgtctgccagcgtgggagacagagtgaccatcacatgcaaggccagcgaccacatcaacaactggctggcctggtatcagcagaagcctggacaggcccctaagctgctgatctacggcgctaccacactggaaacaggcgtgcccagcagattttctggcagcggctctggcaccgactacaccctgacaatatccagcctccagcctgaggacttcgccacctactactgtcagcagagctggaacaccccttggacattcggccagggcaccaagctggaaatcaagagactcgaggccgagatcagccacacccagaaagccaccctcgtgtgcctggctaccggcttctaccccgaccatgtggaactgtcttggtgggtcaacggcaaagaggtgcacagcggcgtgtgtaccgacccccagccactgaaagaacagcccgccctgaacgacagccggtactgcctgagcagcagactgagagtgtccgccaccttctggcagaacccccggaaccacttcagatgccaggtgcagttctacggcctgagcgagaacgacgagtggacccaggacagagccaagcccgtgacccagatcgtgtctgccgaagcctggggcagagccgattgcggctttaccagcgagagctaccagcagggcgtgctgagcgccaccatcctgtacgagatcctgctgggcaaggccaccctgtacgccgtgctggtgtctgccctggtgctgatggctatggtcaagcggaaggacagccggggaagggccaagcgatctggatctggagcaacaaacttctcactactcaaacaagcaggtgacgtggaggagaatcccgggcctactagtatggactggatttggcgcatccttttccttgtcggcgctgctaccggcgcgcattccttcgaacaagttcagcttcaacagcctggcgctgagctggtcaaacctggcgcttctgtgaagatgagctgcaaagccagcggctacgccttcagcagctactggatcaactggatgaagcagaaacccggccagggactcgaatggatcggccaaatctatcccggcgacggcgacaccaactacaacggcaagttcaagggcagagccacactgaccgccgatacctctagcagcacagcctacatgcagctgagcagcctgaccagcgaagatagcgccgtgtacttctgtgcccggtccatcacaacagtcgtgggctgcgctatggactattggggccagggaacaagcgtgaccgtgtctagtacgcgtgacaagagcgtgtgtctgttcaccgacttcgacagccagaccaacgtgtcccagagcaaggactccgacgtgtacatcaccgataagtgcgtgctggacatgcggagcatggacttcaagagcaactccgccgtggcctggtccaacaagtccgatttcgcctgcgccaacgccttcaacaacagcattatccccgaggacacattcttcccaagccccgagagcagctgcgacgtgaagctggtggaaaagagcttcgagacagacaccaacctgaacttccagaacctgagcgtgatcggcttcagaatcctgctgctgaaagtggccggctttaacctgctgatgaccctgcggctgtggtccagccgcgccaagagaagcggatctggcgtgaagcagaccctgaatttcgacctgctgaagctggctggcgacgtggaatccaacccaggcccttctagaggccatatgaccgagtacaagcccacggtgcgcctcgccacccgcgacgacgtccccagggccgtacgcaccctcgccgccgcgttcgccgactaccccgccacgcgccacaccgtcgatccggaccgccacatcgagcgggtcaccgagctgcaagaactcttcctcacgcgcgtcgggctcgacatcggcaaggtgtgggtcgcggacgacggcgccgcggtggcggtctggaccacgccggagagcgtcgaagcgggggcggtgttcgccgagatcggcccgcgcatggccgagttgagcggttcccggctggccgcgcagcaacagatggaaggcctcctggcgccgcaccggcccaaggagcccgcgtggttcctggccaccgtcggcgtctcgcccgaccaccagggcaagggtctgggcagcgccgtcgtgctccccggagtggaggcggccgagcgcgccggggtgcccgccttcctggagacctccgcgccccgcaacctccccttctacgagcggctcggcttcaccgtcaccgccgacgtcgaggtgcccgaaggaccgcgcacctggtgcatgacccgcaagcccggtgcctga

SEQ ID NO: 21827 - DNA, 2439 bp, Artificial Sequence
  Synthetic Polynucleotide
atggccttaccagtgaccgccttgctcctgccgctggccttgctgctccacgccgccaggccggacatccagatgacacagagccctagcagcctgtctgccagcgtgggagacagagtgaccatcacatgcaaggccagcgaccacatcaacaactggctggcctggtatcagcagaagcctggacaggcccctaagctgctgatctacggcgctaccacactggaaacaggcgtgcccagcagattttctggcagcggctctggcaccgactacaccctgacaatatccagcctccagcctgaggacttcgccacctactactgtcagcagagctggaacaccccttggacattcggccagggcaccaagctggaaatcaagagactcgaggccgagatcagccacacccagaaagccaccctcgtgtgcctggctaccggcttctaccccgaccatgtggaactgtcttggtgggtcaacggcaaagaggtgcacagcggcgtgtgtaccgacccccagccactgaaagaacagcccgccctgaacgacagccggtactgcctgagcagcagactgagagtgtccgccaccttctggcagaacccccggaaccacttcagatgccaggtgcagttctacggcctgagcgagaacgacgagtggacccaggacagagccaagcccgtgacccagatcgtgtctgccgaagcctggggcagagccgattgcggctttaccagcgagagctaccagcagggcgtgctgagcgccaccatcctgtacgagatcctgctgggcaaggccaccctgtacgccgtgctggtgtctgccctggtgctgatggctatggtcaagcggaaggacagccggggaagggccaagcgatctggatctggagcaacaaacttctcactactcaaacaagcaggtgacgtggaggagaatcccgggcctactagtatggactggatttggcgcatccttttccttgtcggcgctgctaccggcgcgcattccttcgaacaagttcagcttcaacagcctggcgctgagctggtcaaacctggcgcttctgtgaagatgagctgcaaagccagcggctacgccttcagcagctactggatcaactggatgaagcagaaacccggccagggactcgaatggatcggccaaatctatcccggcgacggcgacaccaactacaacggcaagttcaagggcagagccacactgaccgccgatacctctagcagcacagcctacatgcagctgagcagcctgaccagcgaagatagcgccgtgtacttctgtgcccggtccatcacaacagtcgtgggctgcgctatggactattggggccagggaacaagcgtgaccgtgtctagtacgcgtttcgacagccagaccaacgtgtcccagagcaaggactccgacgtgtacatcaccgataagtgcgtgctggacatgcggagcatggacttcaagagcaactccgccgtggcctggtccaacaagtccgatttcgcctgcgccaacgccttcaacaacagcattatccccgaggacacattcttcccaagccccgagagcagctgcgacgtgaagctggtggaaaagagcttcgagacagacaccaacctgaacttccagaacctgagcgtgatcggcttcagaatcctgctgctgaaagtggccggctttaacctgctgatgaccctgcggctgtggtccagccgcgccaagagaagcggatctggcgtgaagcagaccctgaatttcgacctgctgaagctggctggcgacgtggaatccaacccaggcccttctagaggccatatgaccgagtacaagcccacggtgcgcctcgccacccgcgacgacgtccccagggccgtacgcaccctcgccgccgcgttcgccgactaccccgccacgcgccacaccgtcgatccggaccgccacatcgagcgggtcaccgagctgcaagaactcttcctcacgcgcgtcgggctcgacatcggcaaggtgtgggtcgcggacgacggcgccgcggtggcggtctggaccacgccggagagcgtcgaagcgggggcggtgttcgccgagatcggcccgcgcatggccgagttgagcggttcccggctggccgcgcagcaacagatggaaggcctcctggcgccgcaccggcccaaggagcccgcgtggttcctggccaccgtcggcgtctcgcccgaccaccagggcaagggtctgggcagcgccgtcgtgctccccggagtggaggcggccgagcgcgccggggtgcccgccttcctggagacctccgcgccccgcaacctccccttctacgagcggctcggcttcaccgtcaccgccgacgtcgaggtgcccgaaggaccgcgcacctggtgcatgacccgcaagcccggtgcctga

SEQ ID NO: 21828 - DNA, 2421 bp, Artificial Sequence
  Synthetic Polynucleotide
atggccttaccagtgaccgccttgctcctgccgctggccttgctgctccacgccgccaggccggacatccagatgacacagagccctagcagcctgtctgccagcgtgggagacagagtgaccatcacatgcaaggccagcgaccacatcaacaactggctggcctggtatcagcagaagcctggacaggcccctaagctgctgatctacggcgctaccacactggaaacaggcgtgcccagcagattttctggcagcggctctggcaccgactacaccctgacaatatccagcctccagcctgaggacttcgccacctactactgtcagcagagctggaacaccccttggacattcggccagggcaccaagctggaaatcaagagactcgaggccgagatcagccacacccagaaagccaccctcgtgtgcctggctaccggcttctaccccgaccatgtggaactgtcttggtgggtcaacggcaaagaggtgcacagcggcgtgtgtaccgacccccagccactgaaagaacagcccgccctgaacgacagccggtactgcctgagcagcagactgagagtgtccgccaccttctggcagaacccccggaaccacttcagatgccaggtgcagttctacggcctgagcgagaacgacgagtggacccaggacagagccaagcccgtgacccagatcgtgtctgccgaagcctggggcagagccgattgcggctttaccagcgagagctaccagcagggcgtgctgagcgccaccatcctgtacgagatcctgctgggcaaggccaccctgtacgccgtgctggtgtctgccctggtgctgatggctatggtcaagcggaaggacagccggggaagggccaagcgatctggatctggagcaacaaacttctcactactcaaacaagcaggtgacgtggaggagaatcccgggcctactagtatggactggatttggcgcatccttttccttgtcggcgctgctaccggcgcgcattccttcgaacaagttcagcttcaacagcctggcgctgagctggtcaaacctggcgcttctgtgaagatgagctgcaaagccagcggctacgccttcagcagctactggatcaactggatgaagcagaaacccggccagggactcgaatggatcggccaaatctatcccggcgacggcgacaccaactacaacggcaagttcaagggcagagccacactgaccgccgatacctctagcagcacagcctacatgcagctgagcagcctgaccagcgaagatagcgccgtgtacttctgtgcccggtccatcacaacagtcgtgggctgcgctatggactattggggccagggaacaagcgtgaccgtgtctagtacgcgtgtgtcccagagcaaggactccgacgtgtacatcaccgataagtgcgtgctggacatgcggagcatggacttcaagagcaactccgccgtggcctggtccaacaagtccgatttcgcctgcgccaacgccttcaacaacagcattatccccgaggacacattcttcccaagccccgagagcagctgcgacgtgaagctggtggaaaagagcttcgagacagacaccaacctgaacttccagaacctgagcgtgatcggcttcagaatcctgctgctgaaagtggccggctttaacctgctgatgaccctgcggctgtggtccagccgcgccaagagaagcggatctggcgtgaagcagaccctgaatttcgacctgctgaagctggctggcgacgtggaatccaacccaggcccttctagaggccatatgaccgagtacaagcccacggtgcgcctcgccacccgcgacgacgtccccagggccgtacgcaccctcgccgccgcgttcgccgactaccccgccacgcgccacaccgtcgatccggaccgccacatcgagcgggtcaccgagctgcaagaactcttcctcacgcgcgtcgggctcgacatcggcaaggtgtgggtcgcggacgacggcgccgcggtggcggtctggaccacgccggagagcgtcgaagcgggggcggtgttcgccgagatcggcccgcgcatggccgagttgagcggttcccggctggccgcgcagcaacagatggaaggcctcctggcgccgcaccggcccaaggagcccgcgtggttcctggccaccgtcggcgtctcgcccgaccaccagggcaagggtctgggcagcgccgtcgtgctccccggagtggaggcggccgagcgcgccggggtgcccgccttcctggagacctccgcgccccgcaacctccccttctacgagcggctcggcttcaccgtcaccgccgacgtcgaggtgcccgaaggaccgcgcacctggtgcatgacccgcaagcccggtgcctga

SEQ ID NO: 21829 - DNA, 2406 bp, Artificial Sequence
  Synthetic Polynucleotide
atggccttaccagtgaccgccttgctcctgccgctggccttgctgctccacgccgccaggccggacatccagatgacacagagccctagcagcctgtctgccagcgtgggagacagagtgaccatcacatgcaaggccagcgaccacatcaacaactggctggcctggtatcagcagaagcctggacaggcccctaagctgctgatctacggcgctaccacactggaaacaggcgtgcccagcagattttctggcagcggctctggcaccgactacaccctgacaatatccagcctccagcctgaggacttcgccacctactactgtcagcagagctggaacaccccttggacattcggccagggcaccaagctggaaatcaagagactcgaggccgagatcagccacacccagaaagccaccctcgtgtgcctggctaccggcttctaccccgaccatgtggaactgtcttggtgggtcaacggcaaagaggtgcacagcggcgtgtgtaccgacccccagccactgaaagaacagcccgccctgaacgacagccggtactgcctgagcagcagactgagagtgtccgccaccttctggcagaacccccggaaccacttcagatgccaggtgcagttctacggcctgagcgagaacgacgagtggacccaggacagagccaagcccgtgacccagatcgtgtctgccgaagcctggggcagagccgattgcggctttaccagcgagagctaccagcagggcgtgctgagcgccaccatcctgtacgagatcctgctgggcaaggccaccctgtacgccgtgctggtgtctgccctggtgctgatggctatggtcaagcggaaggacagccggggaagggccaagcgatctggatctggagcaacaaacttctcactactcaaacaagcaggtgacgtggaggagaatcccgggcctactagtatggactggatttggcgcatccttttccttgtcggcgctgctaccggcgcgcattccttcgaacaagttcagcttcaacagcctggcgctgagctggtcaaacctggcgcttctgtgaagatgagctgcaaagccagcggctacgccttcagcagctactggatcaactggatgaagcagaaacccggccagggactcgaatggatcggccaaatctatcccggcgacggcgacaccaactacaacggcaagttcaagggcagagccacactgaccgccgatacctctagcagcacagcctacatgcagctgagcagcctgaccagcgaagatagcgccgtgtacttctgtgcccggtccatcacaacagtcgtgggctgcgctatggactattggggccagggaacaagcgtgaccgtgtctagtacgcgtgactccgacgtgtacatcaccgataagtgcgtgctggacatgcggagcatggacttcaagagcaactccgccgtggcctggtccaacaagtccgatttcgcctgcgccaacgccttcaacaacagcattatccccgaggacacattcttcccaagccccgagagcagctgcgacgtgaagctggtggaaaagagcttcgagacagacaccaacctgaacttccagaacctgagcgtgatcggcttcagaatcctgctgctgaaagtggccggctttaacctgctgatgaccctgcggctgtggtccagccgcgccaagagaagcggatctggcgtgaagcagaccctgaatttcgacctgctgaagctggctggcgacgtggaatccaacccaggcccttctagaggccatatgaccgagtacaagcccacggtgcgcctcgccacccgcgacgacgtccccagggccgtacgcaccctcgccgccgcgttcgccgactaccccgccacgcgccacaccgtcgatccggaccgccacatcgagcgggtcaccgagctgcaagaactcttcctcacgcgcgtcgggctcgacatcggcaaggtgtgggtcgcggacgacggcgccgcggtggcggtctggaccacgccggagagcgtcgaagcgggggcggtgttcgccgagatcggcccgcgcatggccgagttgagcggttcccggctggccgcgcagcaacagatggaaggcctcctggcgccgcaccggcccaaggagcccgcgtggttcctggccaccgtcggcgtctcgcccgaccaccagggcaagggtctgggcagcgccgtcgtgctccccggagtggaggcggccgagcgcgccggggtgcccgccttcctggagacctccgcgccccgcaacctccccttctacgagcggctcggcttcaccgtcaccgccgacgtcgaggtgcccgaaggaccgcgcacctggtgcatgacccgcaagcccggtgcctga

SEQ ID NO: 21830 - DNA, 2379 bp, Artificial Sequence
  Synthetic Polynucleotide
atggccttaccagtgaccgccttgctcctgccgctggccttgctgctccacgccgccaggccggacatccagatgacacagagccctagcagcctgtctgccagcgtgggagacagagtgaccatcacatgcaaggccagcgaccacatcaacaactggctggcctggtatcagcagaagcctggacaggcccctaagctgctgatctacggcgctaccacactggaaacaggcgtgcccagcagattttctggcagcggctctggcaccgactacaccctgacaatatccagcctccagcctgaggacttcgccacctactactgtcagcagagctggaacaccccttggacattcggccagggcaccaagctggaaatcaagagactcgaggccgagatcagccacacccagaaagccaccctcgtgtgcctggctaccggcttctaccccgaccatgtggaactgtcttggtgggtcaacggcaaagaggtgcacagcggcgtgtgtaccgacccccagccactgaaagaacagcccgccctgaacgacagccggtactgcctgagcagcagactgagagtgtccgccaccttctggcagaacccccggaaccacttcagatgccaggtgcagttctacggcctgagcgagaacgacgagtggacccaggacagagccaagcccgtgacccagatcgtgtctgccgaagcctggggcagagccgattgcggctttaccagcgagagctaccagcagggcgtgctgagcgccaccatcctgtacgagatcctgctgggcaaggccaccctgtacgccgtgctggtgtctgccctggtgctgatggctatggtcaagcggaaggacagccggggaagggccaagcgatctggatctggagcaacaaacttctcactactcaaacaagcaggtgacgtggaggagaatcccgggcctactagtatggactggatttggcgcatccttttccttgtcggcgctgctaccggcgcgcattccttcgaacaagttcagcttcaacagcctggcgctgagctggtcaaacctggcgcttctgtgaagatgagctgcaaagccagcggctacgccttcagcagctactggatcaactggatgaagcagaaacccggccagggactcgaatggatcggccaaatctatcccggcgacggcgacaccaactacaacggcaagttcaagggcagagccacactgaccgccgatacctctagcagcacagcctacatgcagctgagcagcctgaccagcgaagatagcgccgtgtacttctgtgcccggtccatcacaacagtcgtgggctgcgctatggactattggggccagggaacaagcgtgaccgtgtctagtacgcgttgcgtgctggacatgcggagcatggacttcaagagcaactccgccgtggcctggtccaacaagtccgatttcgcctgcgccaacgccttcaacaacagcattatccccgaggacacattcttcccaagccccgagagcagctgcgacgtgaagctggtggaaaagagcttcgagacagacaccaacctgaacttccagaacctgagcgtgatcggcttcagaatcctgctgctgaaagtggccggctttaacctgctgatgaccctgcggctgtggtccagccgcgccaagagaagcggatctggcgtgaagcagaccctgaatttcgacctgctgaagctggctggcgacgtggaatccaacccaggcccttctagaggccatatgaccgagtacaagcccacggtgcgcctcgccacccgcgacgacgtccccagggccgtacgcaccctcgccgccgcgttcgccgactaccccgccacgcgccacaccgtcgatccggaccgccacatcgagcgggtcaccgagctgcaagaactcttcctcacgcgcgtcgggctcgacatcggcaaggtgtgggtcgcggacgacggcgccgcggtggcggtctggaccacgccggagagcgtcgaagcgggggcggtgttcgccgagatcggcccgcgcatggccgagttgagcggttcccggctggccgcgcagcaacagatggaaggcctcctggcgccgcaccggcccaaggagcccgcgtggttcctggccaccgtcggcgtctcgcccgaccaccagggcaagggtctgggcagcgccgtcgtgctccccggagtggaggcggccgagcgcgccggggtgcccgccttcctggagacctccgcgccccgcaacctccccttctacgagcggctcggcttcaccgtcaccgccgacgtcgaggtgcccgaaggaccgcgcacctggtgcatgacccgcaagcccggtgcctga

SEQ ID NO: 21831 - DNA, 2361 bp, Artificial Sequence
  Synthetic Polynucleotide
atggccttaccagtgaccgccttgctcctgccgctggccttgctgctccacgccgccaggccggacatccagatgacacagagccctagcagcctgtctgccagcgtgggagacagagtgaccatcacatgcaaggccagcgaccacatcaacaactggctggcctggtatcagcagaagcctggacaggcccctaagctgctgatctacggcgctaccacactggaaacaggcgtgcccagcagattttctggcagcggctctggcaccgactacaccctgacaatatccagcctccagcctgaggacttcgccacctactactgtcagcagagctggaacaccccttggacattcggccagggcaccaagctggaaatcaagagactcgaggccgagatcagccacacccagaaagccaccctcgtgtgcctggctaccggcttctaccccgaccatgtggaactgtcttggtgggtcaacggcaaagaggtgcacagcggcgtgtgtaccgacccccagccactgaaagaacagcccgccctgaacgacagccggtactgcctgagcagcagactgagagtgtccgccaccttctggcagaacccccggaaccacttcagatgccaggtgcagttctacggcctgagcgagaacgacgagtggacccaggacagagccaagcccgtgacccagatcgtgtctgccgaagcctggggcagagccgattgcggctttaccagcgagagctaccagcagggcgtgctgagcgccaccatcctgtacgagatcctgctgggcaaggccaccctgtacgccgtgctggtgtctgccctggtgctgatggctatggtcaagcggaaggacagccggggaagggccaagcgatctggatctggagcaacaaacttctcactactcaaacaagcaggtgacgtggaggagaatcccgggcctactagtatggactggatttggcgcatccttttccttgtcggcgctgctaccggcgcgcattccttcgaacaagttcagcttcaacagcctggcgctgagctggtcaaacctggcgcttctgtgaagatgagctgcaaagccagcggctacgccttcagcagctactggatcaactggatgaagcagaaacccggccagggactcgaatggatcggccaaatctatcccggcgacggcgacaccaactacaacggcaagttcaagggcagagccacactgaccgccgatacctctagcagcacagcctacatgcagctgagcagcctgaccagcgaagatagcgccgtgtacttctgtgcccggtccatcacaacagtcgtgggctgcgctatggactattggggccagggaacaagcgtgaccgtgtctagtacgcgtagcatggacttcaagagcaactccgccgtggcctggtccaacaagtccgatttcgcctgcgccaacgccttcaacaacagcattatccccgaggacacattcttcccaagccccgagagcagctgcgacgtgaagctggtggaaaagagcttcgagacagacaccaacctgaacttccagaacctgagcgtgatcggcttcagaatcctgctgctgaaagtggccggctttaacctgctgatgaccctgcggctgtggtccagccgcgccaagagaagcggatctggcgtgaagcagaccctgaatttcgacctgctgaagctggctggcgacgtggaatccaacccaggcccttctagaggccatatgaccgagtacaagcccacggtgcgcctcgccacccgcgacgacgtccccagggccgtacgcaccctcgccgccgcgttcgccgactaccccgccacgcgccacaccgtcgatccggaccgccacatcgagcgggtcaccgagctgcaagaactcttcctcacgcgcgtcgggctcgacatcggcaaggtgtgggtcgcggacgacggcgccgcggtggcggtctggaccacgccggagagcgtcgaagcgggggcggtgttcgccgagatcggcccgcgcatggccgagttgagcggttcccggctggccgcgcagcaacagatggaaggcctcctggcgccgcaccggcccaaggagcccgcgtggttcctggccaccgtcggcgtctcgcccgaccaccagggcaagggtctgggcagcgccgtcgtgctccccggagtggaggcggccgagcgcgccggggtgcccgccttcctggagacctccgcgccccgcaacctccccttctacgagcggctcggcttcaccgtcaccgccgacgtcgaggtgcccgaaggaccgcgcacctggtgcatgacccgcaagcccggtgcctga

SEQ ID NO: 21832 - DNA, 2349 bp, Artificial Sequence
  Synthetic Polynucleotide
atggccttaccagtgaccgccttgctcctgccgctggccttgctgctccacgccgccaggccggacatccagatgacacagagccctagcagcctgtctgccagcgtgggagacagagtgaccatcacatgcaaggccagcgaccacatcaacaactggctggcctggtatcagcagaagcctggacaggcccctaagctgctgatctacggcgctaccacactggaaacaggcgtgcccagcagattttctggcagcggctctggcaccgactacaccctgacaatatccagcctccagcctgaggacttcgccacctactactgtcagcagagctggaacaccccttggacattcggccagggcaccaagctggaaatcaagagactcgagctgtcttggtgggtcaacggcaaagaggtgcacagcggcgtgtgtaccgacccccagccactgaaagaacagcccgccctgaacgacagccggtactgcctgagcagcagactgagagtgtccgccaccttctggcagaacccccggaaccacttcagatgccaggtgcagttctacggcctgagcgagaacgacgagtggacccaggacagagccaagcccgtgacccagatcgtgtctgccgaagcctggggcagagccgattgcggctttaccagcgagagctaccagcagggcgtgctgagcgccaccatcctgtacgagatcctgctgggcaaggccaccctgtacgccgtgctggtgtctgccctggtgctgatggctatggtcaagcggaaggacagccggggaagggccaagcgatctggatctggagcaacaaacttctcactactcaaacaagcaggtgacgtggaggagaatcccgggcctactagtatggactggatttggcgcatccttttccttgtcggcgctgctaccggcgcgcattccttcgaacaagttcagcttcaacagcctggcgctgagctggtcaaacctggcgcttctgtgaagatgagctgcaaagccagcggctacgccttcagcagctactggatcaactggatgaagcagaaacccggccagggactcgaatggatcggccaaatctatcccggcgacggcgacaccaactacaacggcaagttcaagggcagagccacactgaccgccgatacctctagcagcacagcctacatgcagctgagcagcctgaccagcgaagatagcgccgtgtacttctgtgcccggtccatcacaacagtcgtgggctgcgctatggactattggggccagggaacaagcgtgaccgtgtctagtacgcgtgtgtcccagagcaaggactccgacgtgtacatcaccgataagtgcgtgctggacatgcggagcatggacttcaagagcaactccgccgtggcctggtccaacaagtccgatttcgcctgcgccaacgccttcaacaacagcattatccccgaggacacattcttcccaagccccgagagcagctgcgacgtgaagctggtggaaaagagcttcgagacagacaccaacctgaacttccagaacctgagcgtgatcggcttcagaatcctgctgctgaaagtggccggctttaacctgctgatgaccctgcggctgtggtccagccgcgccaagagaagcggatctggcgtgaagcagaccctgaatttcgacctgctgaagctggctggcgacgtggaatccaacccaggcccttctagaggccatatgaccgagtacaagcccacggtgcgcctcgccacccgcgacgacgtccccagggccgtacgcaccctcgccgccgcgttcgccgactaccccgccacgcgccacaccgtcgatccggaccgccacatcgagcgggtcaccgagctgcaagaactcttcctcacgcgcgtcgggctcgacatcggcaaggtgtgggtcgcggacgacggcgccgcggtggcggtctggaccacgccggagagcgtcgaagcgggggcggtgttcgccgagatcggcccgcgcatggccgagttgagcggttcccggctggccgcgcagcaacagatggaaggcctcctggcgccgcaccggcccaaggagcccgcgtggttcctggccaccgtcggcgtctcgcccgaccaccagggcaagggtctgggcagcgccgtcgtgctccccggagtggaggcggccgagcgcgccggggtgcccgccttcctggagacctccgcgccccgcaacctccccttctacgagcggctcggcttcaccgtcaccgccgacgtcgaggtgcccgaaggaccgcgcacctggtgcatgacccgcaagcccggtgcctga

SEQ ID NO: 21833 - DNA, 2307 bp, Artificial Sequence
  Synthetic Polynucleotide
atggccttaccagtgaccgccttgctcctgccgctggccttgctgctccacgccgccaggccggacatccagatgacacagagccctagcagcctgtctgccagcgtgggagacagagtgaccatcacatgcaaggccagcgaccacatcaacaactggctggcctggtatcagcagaagcctggacaggcccctaagctgctgatctacggcgctaccacactggaaacaggcgtgcccagcagattttctggcagcggctctggcaccgactacaccctgacaatatccagcctccagcctgaggacttcgccacctactactgtcagcagagctggaacaccccttggacattcggccagggcaccaagctggaaatcaagagactcgaggtgcacagcggcgtgtgtaccgacccccagccactgaaagaacagcccgccctgaacgacagccggtactgcctgagcagcagactgagagtgtccgccaccttctggcagaacccccggaaccacttcagatgccaggtgcagttctacggcctgagcgagaacgacgagtggacccaggacagagccaagcccgtgacccagatcgtgtctgccgaagcctggggcagagccgattgcggctttaccagcgagagctaccagcagggcgtgctgagcgccaccatcctgtacgagatcctgctgggcaaggccaccctgtacgccgtgctggtgtctgccctggtgctgatggctatggtcaagcggaaggacagccggggaagggccaagcgatctggatctggagcaacaaacttctcactactcaaacaagcaggtgacgtggaggagaatcccgggcctactagtatggactggatttggcgcatccttttccttgtcggcgctgctaccggcgcgcattccttcgaacaagttcagcttcaacagcctggcgctgagctggtcaaacctggcgcttctgtgaagatgagctgcaaagccagcggctacgccttcagcagctactggatcaactggatgaagcagaaacccggccagggactcgaatggatcggccaaatctatcccggcgacggcgacaccaactacaacggcaagttcaagggcagagccacactgaccgccgatacctctagcagcacagcctacatgcagctgagcagcctgaccagcgaagatagcgccgtgtacttctgtgcccggtccatcacaacagtcgtgggctgcgctatggactattggggccagggaacaagcgtgaccgtgtctagtacgcgtgactccgacgtgtacatcaccgataagtgcgtgctggacatgcggagcatggacttcaagagcaactccgccgtggcctggtccaacaagtccgatttcgcctgcgccaacgccttcaacaacagcattatccccgaggacacattcttcccaagccccgagagcagctgcgacgtgaagctggtggaaaagagcttcgagacagacaccaacctgaacttccagaacctgagcgtgatcggcttcagaatcctgctgctgaaagtggccggctttaacctgctgatgaccctgcggctgtggtccagccgcgccaagagaagcggatctggcgtgaagcagaccctgaatttcgacctgctgaagctggctggcgacgtggaatccaacccaggcccttctagaggccatatgaccgagtacaagcccacggtgcgcctcgccacccgcgacgacgtccccagggccgtacgcaccctcgccgccgcgttcgccgactaccccgccacgcgccacaccgtcgatccggaccgccacatcgagcgggtcaccgagctgcaagaactcttcctcacgcgcgtcgggctcgacatcggcaaggtgtgggtcgcggacgacggcgccgcggtggcggtctggaccacgccggagagcgtcgaagcgggggcggtgttcgccgagatcggcccgcgcatggccgagttgagcggttcccggctggccgcgcagcaacagatggaaggcctcctggcgccgcaccggcccaaggagcccgcgtggttcctggccaccgtcggcgtctcgcccgaccaccagggcaagggtctgggcagcgccgtcgtgctccccggagtggaggcggccgagcgcgccggggtgcccgccttcctggagacctccgcgccccgcaacctccccttctacgagcggctcggcttcaccgtcaccgccgacgtcgaggtgcccgaaggaccgcgcacctggtgcatgacccgcaagcccggtgcctga

SEQ ID NO: 21834 - DNA, 2265 bp, Artificial Sequence
  Synthetic Polynucleotide
atggccttaccagtgaccgccttgctcctgccgctggccttgctgctccacgccgccaggccggacatccagatgacacagagccctagcagcctgtctgccagcgtgggagacagagtgaccatcacatgcaaggccagcgaccacatcaacaactggctggcctggtatcagcagaagcctggacaggcccctaagctgctgatctacggcgctaccacactggaaacaggcgtgcccagcagattttctggcagcggctctggcaccgactacaccctgacaatatccagcctccagcctgaggacttcgccacctactactgtcagcagagctggaacaccccttggacattcggccagggcaccaagctggaaatcaagagactcgagtgtaccgacccccagccactgaaagaacagcccgccctgaacgacagccggtactgcctgagcagcagactgagagtgtccgccaccttctggcagaacccccggaaccacttcagatgccaggtgcagttctacggcctgagcgagaacgacgagtggacccaggacagagccaagcccgtgacccagatcgtgtctgccgaagcctggggcagagccgattgcggctttaccagcgagagctaccagcagggcgtgctgagcgccaccatcctgtacgagatcctgctgggcaaggccaccctgtacgccgtgctggtgtctgccctggtgctgatggctatggtcaagcggaaggacagccggggaagggccaagcgatctggatctggagcaacaaacttctcactactcaaacaagcaggtgacgtggaggagaatcccgggcctactagtatggactggatttggcgcatccttttccttgtcggcgctgctaccggcgcgcattccttcgaacaagttcagcttcaacagcctggcgctgagctggtcaaacctggcgcttctgtgaagatgagctgcaaagccagcggctacgccttcagcagctactggatcaactggatgaagcagaaacccggccagggactcgaatggatcggccaaatctatcccggcgacggcgacaccaactacaacggcaagttcaagggcagagccacactgaccgccgatacctctagcagcacagcctacatgcagctgagcagcctgaccagcgaagatagcgccgtgtacttctgtgcccggtccatcacaacagtcgtgggctgcgctatggactattggggccagggaacaagcgtgaccgtgtctagtacgcgttgcgtgctggacatgcggagcatggacttcaagagcaactccgccgtggcctggtccaacaagtccgatttcgcctgcgccaacgccttcaacaacagcattatccccgaggacacattcttcccaagccccgagagcagctgcgacgtgaagctggtggaaaagagcttcgagacagacaccaacctgaacttccagaacctgagcgtgatcggcttcagaatcctgctgctgaaagtggccggctttaacctgctgatgaccctgcggctgtggtccagccgcgccaagagaagcggatctggcgtgaagcagaccctgaatttcgacctgctgaagctggctggcgacgtggaatccaacccaggcccttctagaggccatatgaccgagtacaagcccacggtgcgcctcgccacccgcgacgacgtccccagggccgtacgcaccctcgccgccgcgttcgccgactaccccgccacgcgccacaccgtcgatccggaccgccacatcgagcgggtcaccgagctgcaagaactcttcctcacgcgcgtcgggctcgacatcggcaaggtgtgggtcgcggacgacggcgccgcggtggcggtctggaccacgccggagagcgtcgaagcgggggcggtgttcgccgagatcggcccgcgcatggccgagttgagcggttcccggctggccgcgcagcaacagatggaaggcctcctggcgccgcaccggcccaaggagcccgcgtggttcctggccaccgtcggcgtctcgcccgaccaccagggcaagggtctgggcagcgccgtcgtgctccccggagtggaggcggccgagcgcgccggggtgcccgccttcctggagacctccgcgccccgcaacctccccttctacgagcggctcggcttcaccgtcaccgccgacgtcgaggtgcccgaaggaccgcgcacctggtgcatgacccgcaagcccggtgcctga

SEQ ID NO: 21835 - DNA, 2223 bp, Artificial Sequence
  Synthetic Polynucleotide
atggccttaccagtgaccgccttgctcctgccgctggccttgctgctccacgccgccaggccggacatccagatgacacagagccctagcagcctgtctgccagcgtgggagacagagtgaccatcacatgcaaggccagcgaccacatcaacaactggctggcctggtatcagcagaagcctggacaggcccctaagctgctgatctacggcgctaccacactggaaacaggcgtgcccagcagattttctggcagcggctctggcaccgactacaccctgacaatatccagcctccagcctgaggacttcgccacctactactgtcagcagagctggaacaccccttggacattcggccagggcaccaagctggaaatcaagagactcgaggaacagcccgccctgaacgacagccggtactgcctgagcagcagactgagagtgtccgccaccttctggcagaacccccggaaccacttcagatgccaggtgcagttctacggcctgagcgagaacgacgagtggacccaggacagagccaagcccgtgacccagatcgtgtctgccgaagcctggggcagagccgattgcggctttaccagcgagagctaccagcagggcgtgctgagcgccaccatcctgtacgagatcctgctgggcaaggccaccctgtacgccgtgctggtgtctgccctggtgctgatggctatggtcaagcggaaggacagccggggaagggccaagcgatctggatctggagcaacaaacttctcactactcaaacaagcaggtgacgtggaggagaatcccgggcctactagtatggactggatttggcgcatccttttccttgtcggcgctgctaccggcgcgcattccttcgaacaagttcagcttcaacagcctggcgctgagctggtcaaacctggcgcttctgtgaagatgagctgcaaagccagcggctacgccttcagcagctactggatcaactggatgaagcagaaacccggccagggactcgaatggatcggccaaatctatcccggcgacggcgacaccaactacaacggcaagttcaagggcagagccacactgaccgccgatacctctagcagcacagcctacatgcagctgagcagcctgaccagcgaagatagcgccgtgtacttctgtgcccggtccatcacaacagtcgtgggctgcgctatggactattggggccagggaacaagcgtgaccgtgtctagtacgcgtagcatggacttcaagagcaactccgccgtggcctggtccaacaagtccgatttcgcctgcgccaacgccttcaacaacagcattatccccgaggacacattcttcccaagccccgagagcagctgcgacgtgaagctggtggaaaagagcttcgagacagacaccaacctgaacttccagaacctgagcgtgatcggcttcagaatcctgctgctgaaagtggccggctttaacctgctgatgaccctgcggctgtggtccagccgcgccaagagaagcggatctggcgtgaagcagaccctgaatttcgacctgctgaagctggctggcgacgtggaatccaacccaggcccttctagaggccatatgaccgagtacaagcccacggtgcgcctcgccacccgcgacgacgtccccagggccgtacgcaccctcgccgccgcgttcgccgactaccccgccacgcgccacaccgtcgatccggaccgccacatcgagcgggtcaccgagctgcaagaactcttcctcacgcgcgtcgggctcgacatcggcaaggtgtgggtcgcggacgacggcgccgcggtggcggtctggaccacgccggagagcgtcgaagcgggggcggtgttcgccgagatcggcccgcgcatggccgagttgagcggttcccggctggccgcgcagcaacagatggaaggcctcctggcgccgcaccggcccaaggagcccgcgtggttcctggccaccgtcggcgtctcgcccgaccaccagggcaagggtctgggcagcgccgtcgtgctccccggagtggaggcggccgagcgcgccggggtgcccgccttcctggagacctccgcgccccgcaacctccccttctacgagcggctcggcttcaccgtcaccgccgacgtcgaggtgcccgaaggaccgcgcacctggtgcatgacccgcaagcccggtgcctga

SEQ ID NO: 21836 - DNA, 2571 bp, Artificial Sequence
  Synthetic Polynucleotide
atggccttaccagtgaccgccttgctcctgccgctggccttgctgctccacgccgccaggccggacatccagatgacacagagccctagcagcctgtctgccagcgtgggagacagagtgaccatcacatgcaaggccagcgaccacatcaacaactggctggcctggtatcagcagaagcctggacaggcccctaagctgctgatctacggcgctaccacactggaaacaggcgtgcccagcagattttctggcagcggctctggcaccgactacaccctgacaatatccagcctccagcctgaggacttcgccacctactactgtcagcagagctggaacaccccttggacattcggccagggcaccaagctggaaatcaagagactcgaggccgacgtgtcccccaagcctaccatcttcctgccctctatcgccgagacaaagctccagaaggccggcacctacctgtgcctgctggaaaagttcttcccagatgtgattaagatccactggcaggaaaagaagtccaacaccatcctgggcagccaggaaggcaacaccatgaagaccaacgacacctacatgaagttcagctggctgaccgtgcccgagaagtccctggacaaagaacacagatgcatcgtgcggcacgaaaacaacaagaacggcgtggaccaggaaatcatcttcccacccatcaagaccgatgtgattacaatggaccccaaggacaactgctccaaggacgccaacgataccctgctgctccagctgaccaacaccagcgcctactacatgtacttgttgctgctgctgaagtccgtggtgtacttcgccatcatcacatgctgcctgctgcggagaaccgccttctgctgcaacggcgagaagtctagggccaagcgatctggatctggagcaacaaacttctcactactcaaacaagcaggtgacgtggaggagaatcccgggcctactagtatggactggatttggcgcatccttttccttgtcggcgctgctaccggcgcgcattccttcgaacaagttcagcttcaacagcctggcgctgagctggtcaaacctggcgcttctgtgaagatgagctgcaaagccagcggctacgccttcagcagctactggatcaactggatgaagcagaaacccggccagggactcgaatggatcggccaaatctatcccggcgacggcgacaccaactacaacggcaagttcaagggcagagccacactgaccgccgatacctctagcagcacagcctacatgcagctgagcagcctgaccagcgaagatagcgccgtgtacttctgtgcccggtccatcacaacagtcgtgggctgcgctatggactattggggccagggaacaagcgtgaccgtgtctagtacgcgtcctcacaccaagcccagcgtgttcgtgatgaagaacggcaccaacgtggcctgcctcgtgaaagagttctaccccaaggacatcaggatcaacctggtgtccagcaagaagatcaccgagttcgaccccgccatcgtgatctcccccagcggcaagtacaacgccgtgaagctggggaagtacgaggacagcaacagcgtgacctgctccgtgcagcacgacaacaagaccgtgcacagcaccgactttgaagtgaaaaccgactccaccgaccacgtgaagcccaaagagacagagaacaccaagcagcccagcaagagctgccacaagcccaaggccatcgtgcacaccgagaaagtgaacatgatgagcctgaccgtgctgggcctgcggatgctgttcgccaaaaccgtggccgtgaacttcctgctgaccgccaagctgttcttcctccgcgccaagagaagcggatctggcgtgaagcagaccctgaatttcgacctgctgaagctggctggcgacgtggaatccaacccaggcccttctagaggccatatgaccgagtacaagcccacggtgcgcctcgccacccgcgacgacgtccccagggccgtacgcaccctcgccgccgcgttcgccgactaccccgccacgcgccacaccgtcgatccggaccgccacatcgagcgggtcaccgagctgcaagaactcttcctcacgcgcgtcgggctcgacatcggcaaggtgtgggtcgcggacgacggcgccgcggtggcggtctggaccacgccggagagcgtcgaagcgggggcggtgttcgccgagatcggcccgcgcatggccgagttgagcggttcccggctggccgcgcagcaacagatggaaggcctcctggcgccgcaccggcccaaggagcccgcgtggttcctggccaccgtcggcgtctcgcccgaccaccagggcaagggtctgggcagcgccgtcgtgctccccggagtggaggcggccgagcgcgccggggtgcccgccttcctggagacctccgcgccccgcaacctccccttctacgagcggctcggcttcaccgtcaccgccgacgtcgaggtgcccgaaggaccgcgcacctggtgcatgacccgcaagcccggtgcctga

SEQ ID NO: 21837 - DNA, 2565 bp, Artificial Sequence
  Synthetic Polynucleotide
atggccttaccagtgaccgccttgctcctgccgctggccttgctgctccacgccgccaggccggacatccagatgacacagagccctagcagcctgtctgccagcgtgggagacagagtgaccatcacatgcaaggccagcgaccacatcaacaactggctggcctggtatcagcagaagcctggacaggcccctaagctgctgatctacggcgctaccacactggaaacaggcgtgcccagcagattttctggcagcggctctggcaccgactacaccctgacaatatccagcctccagcctgaggacttcgccacctactactgtcagcagagctggaacaccccttggacattcggccagggcaccaagctggaaatcaagagactcgaggtgtcccccaagcctaccatcttcctgccctctatcgccgagacaaagctccagaaggccggcacctacctgtgcctgctggaaaagttcttcccagatgtgattaagatccactggcaggaaaagaagtccaacaccatcctgggcagccaggaaggcaacaccatgaagaccaacgacacctacatgaagttcagctggctgaccgtgcccgagaagtccctggacaaagaacacagatgcatcgtgcggcacgaaaacaacaagaacggcgtggaccaggaaatcatcttcccacccatcaagaccgatgtgattacaatggaccccaaggacaactgctccaaggacgccaacgataccctgctgctccagctgaccaacaccagcgcctactacatgtacttgttgctgctgctgaagtccgtggtgtacttcgccatcatcacatgctgcctgctgcggagaaccgccttctgctgcaacggcgagaagtctagggccaagcgatctggatctggagcaacaaacttctcactactcaaacaagcaggtgacgtggaggagaatcccgggcctactagtatggactggatttggcgcatccttttccttgtcggcgctgctaccggcgcgcattccttcgaacaagttcagcttcaacagcctggcgctgagctggtcaaacctggcgcttctgtgaagatgagctgcaaagccagcggctacgccttcagcagctactggatcaactggatgaagcagaaacccggccagggactcgaatggatcggccaaatctatcccggcgacggcgacaccaactacaacggcaagttcaagggcagagccacactgaccgccgatacctctagcagcacagcctacatgcagctgagcagcctgaccagcgaagatagcgccgtgtacttctgtgcccggtccatcacaacagtcgtgggctgcgctatggactattggggccagggaacaagcgtgaccgtgtctagtacgcgtcctcacaccaagcccagcgtgttcgtgatgaagaacggcaccaacgtggcctgcctcgtgaaagagttctaccccaaggacatcaggatcaacctggtgtccagcaagaagatcaccgagttcgaccccgccatcgtgatctcccccagcggcaagtacaacgccgtgaagctggggaagtacgaggacagcaacagcgtgacctgctccgtgcagcacgacaacaagaccgtgcacagcaccgactttgaagtgaaaaccgactccaccgaccacgtgaagcccaaagagacagagaacaccaagcagcccagcaagagctgccacaagcccaaggccatcgtgcacaccgagaaagtgaacatgatgagcctgaccgtgctgggcctgcggatgctgttcgccaaaaccgtggccgtgaacttcctgctgaccgccaagctgttcttcctccgcgccaagagaagcggatctggcgtgaagcagaccctgaatttcgacctgctgaagctggctggcgacgtggaatccaacccaggcccttctagaggccatatgaccgagtacaagcccacggtgcgcctcgccacccgcgacgacgtccccagggccgtacgcaccctcgccgccgcgttcgccgactaccccgccacgcgccacaccgtcgatccggaccgccacatcgagcgggtcaccgagctgcaagaactcttcctcacgcgcgtcgggctcgacatcggcaaggtgtgggtcgcggacgacggcgccgcggtggcggtctggaccacgccggagagcgtcgaagcgggggcggtgttcgccgagatcggcccgcgcatggccgagttgagcggttcccggctggccgcgcagcaacagatggaaggcctcctggcgccgcaccggcccaaggagcccgcgtggttcctggccaccgtcggcgtctcgcccgaccaccagggcaagggtctgggcagcgccgtcgtgctccccggagtggaggcggccgagcgcgccggggtgcccgccttcctggagacctccgcgccccgcaacctccccttctacgagcggctcggcttcaccgtcaccgccgacgtcgaggtgcccgaaggaccgcgcacctggtgcatgacccgcaagcccggtgcctga

SEQ ID NO: 21838 - DNA, 2550 bp, Artificial Sequence
  Synthetic Polynucleotide
atggccttaccagtgaccgccttgctcctgccgctggccttgctgctccacgccgccaggccggacatccagatgacacagagccctagcagcctgtctgccagcgtgggagacagagtgaccatcacatgcaaggccagcgaccacatcaacaactggctggcctggtatcagcagaagcctggacaggcccctaagctgctgatctacggcgctaccacactggaaacaggcgtgcccagcagattttctggcagcggctctggcaccgactacaccctgacaatatccagcctccagcctgaggacttcgccacctactactgtcagcagagctggaacaccccttggacattcggccagggcaccaagctggaaatcaagagactcgagaccatcttcctgccctctatcgccgagacaaagctccagaaggccggcacctacctgtgcctgctggaaaagttcttcccagatgtgattaagatccactggcaggaaaagaagtccaacaccatcctgggcagccaggaaggcaacaccatgaagaccaacgacacctacatgaagttcagctggctgaccgtgcccgagaagtccctggacaaagaacacagatgcatcgtgcggcacgaaaacaacaagaacggcgtggaccaggaaatcatcttcccacccatcaagaccgatgtgattacaatggaccccaaggacaactgctccaaggacgccaacgataccctgctgctccagctgaccaacaccagcgcctactacatgtacttgttgctgctgctgaagtccgtggtgtacttcgccatcatcacatgctgcctgctgcggagaaccgccttctgctgcaacggcgagaagtctagggccaagcgatctggatctggagcaacaaacttctcactactcaaacaagcaggtgacgtggaggagaatcccgggcctactagtatggactggatttggcgcatccttttccttgtcggcgctgctaccggcgcgcattccttcgaacaagttcagcttcaacagcctggcgctgagctggtcaaacctggcgcttctgtgaagatgagctgcaaagccagcggctacgccttcagcagctactggatcaactggatgaagcagaaacccggccagggactcgaatggatcggccaaatctatcccggcgacggcgacaccaactacaacggcaagttcaagggcagagccacactgaccgccgatacctctagcagcacagcctacatgcagctgagcagcctgaccagcgaagatagcgccgtgtacttctgtgcccggtccatcacaacagtcgtgggctgcgctatggactattggggccagggaacaagcgtgaccgtgtctagtacgcgtcctcacaccaagcccagcgtgttcgtgatgaagaacggcaccaacgtggcctgcctcgtgaaagagttctaccccaaggacatcaggatcaacctggtgtccagcaagaagatcaccgagttcgaccccgccatcgtgatctcccccagcggcaagtacaacgccgtgaagctggggaagtacgaggacagcaacagcgtgacctgctccgtgcagcacgacaacaagaccgtgcacagcaccgactttgaagtgaaaaccgactccaccgaccacgtgaagcccaaagagacagagaacaccaagcagcccagcaagagctgccacaagcccaaggccatcgtgcacaccgagaaagtgaacatgatgagcctgaccgtgctgggcctgcggatgctgttcgccaaaaccgtggccgtgaacttcctgctgaccgccaagctgttcttcctccgcgccaagagaagcggatctggcgtgaagcagaccctgaatttcgacctgctgaagctggctggcgacgtggaatccaacccaggcccttctagaggccatatgaccgagtacaagcccacggtgcgcctcgccacccgcgacgacgtccccagggccgtacgcaccctcgccgccgcgttcgccgactaccccgccacgcgccacaccgtcgatccggaccgccacatcgagcgggtcaccgagctgcaagaactcttcctcacgcgcgtcgggctcgacatcggcaaggtgtgggtcgcggacgacggcgccgcggtggcggtctggaccacgccggagagcgtcgaagcgggggcggtgttcgccgagatcggcccgcgcatggccgagttgagcggttcccggctggccgcgcagcaacagatggaaggcctcctggcgccgcaccggcccaaggagcccgcgtggttcctggccaccgtcggcgtctcgcccgaccaccagggcaagggtctgggcagcgccgtcgtgctccccggagtggaggcggccgagcgcgccggggtgcccgccttcctggagacctccgcgccccgcaacctccccttctacgagcggctcggcttcaccgtcaccgccgacgtcgaggtgcccgaaggaccgcgcacctggtgcatgacccgcaagcccggtgcctga

SEQ ID NO: 21839 - DNA, 2547 bp, Artificial Sequence
  Synthetic Polynucleotide
atggccttaccagtgaccgccttgctcctgccgctggccttgctgctccacgccgccaggccggacatccagatgacacagagccctagcagcctgtctgccagcgtgggagacagagtgaccatcacatgcaaggccagcgaccacatcaacaactggctggcctggtatcagcagaagcctggacaggcccctaagctgctgatctacggcgctaccacactggaaacaggcgtgcccagcagattttctggcagcggctctggcaccgactacaccctgacaatatccagcctccagcctgaggacttcgccacctactactgtcagcagagctggaacaccccttggacattcggccagggcaccaagctggaaatcaagagactcgaggtgtcccccaagcctaccatcttcctgccctctatcgccgagacaaagctccagaaggccggcacctacctgtgcctgctggaaaagttcttcccagatgtgattaagatccactggcaggaaaagaagtccaacaccatcctgggcagccaggaaggcaacaccatgaagaccaacgacacctacatgaagttcagctggctgaccgtgcccgagaagtccctggacaaagaacacagatgcatcgtgcggcacgaaaacaacaagaacggcgtggaccaggaaatcatcttcccacccatcaagaccgatgtgattacaatggaccccaaggacaactgctccaaggacgccaacgataccctgctgctccagctgaccaacaccagcgcctactacatgtacttgttgctgctgctgaagtccgtggtgtacttcgccatcatcacatgctgcctgctgcggagaaccgccttctgctgcaacggcgagaagtctagggccaagcgatctggatctggagcaacaaacttctcactactcaaacaagcaggtgacgtggaggagaatcccgggcctactagtatggactggatttggcgcatccttttccttgtcggcgctgctaccggcgcgcattccttcgaacaagttcagcttcaacagcctggcgctgagctggtcaaacctggcgcttctgtgaagatgagctgcaaagccagcggctacgccttcagcagctactggatcaactggatgaagcagaaacccggccagggactcgaatggatcggccaaatctatcccggcgacggcgacaccaactacaacggcaagttcaagggcagagccacactgaccgccgatacctctagcagcacagcctacatgcagctgagcagcctgaccagcgaagatagcgccgtgtacttctgtgcccggtccatcacaacagtcgtgggctgcgctatggactattggggccagggaacaagcgtgaccgtgtctagtacgcgtgtgttcgtgatgaagaacggcaccaacgtggcctgcctcgtgaaagagttctaccccaaggacatcaggatcaacctggtgtccagcaagaagatcaccgagttcgaccccgccatcgtgatctcccccagcggcaagtacaacgccgtgaagctggggaagtacgaggacagcaacagcgtgacctgctccgtgcagcacgacaacaagaccgtgcacagcaccgactttgaagtgaaaaccgactccaccgaccacgtgaagcccaaagagacagagaacaccaagcagcccagcaagagctgccacaagcccaaggccatcgtgcacaccgagaaagtgaacatgatgagcctgaccgtgctgggcctgcggatgctgttcgccaaaaccgtggccgtgaacttcctgctgaccgccaagctgttcttcctccgcgccaagagaagcggatctggcgtgaagcagaccctgaatttcgacctgctgaagctggctggcgacgtggaatccaacccaggcccttctagaggccatatgaccgagtacaagcccacggtgcgcctcgccacccgcgacgacgtccccagggccgtacgcaccctcgccgccgcgttcgccgactaccccgccacgcgccacaccgtcgatccggaccgccacatcgagcgggtcaccgagctgcaagaactcttcctcacgcgcgtcgggctcgacatcggcaaggtgtgggtcgcggacgacggcgccgcggtggcggtctggaccacgccggagagcgtcgaagcgggggcggtgttcgccgagatcggcccgcgcatggccgagttgagcggttcccggctggccgcgcagcaacagatggaaggcctcctggcgccgcaccggcccaaggagcccgcgtggttcctggccaccgtcggcgtctcgcccgaccaccagggcaagggtctgggcagcgccgtcgtgctccccggagtggaggcggccgagcgcgccggggtgcccgccttcctggagacctccgcgccccgcaacctccccttctacgagcggctcggcttcaccgtcaccgccgacgtcgaggtgcccgaaggaccgcgcacctggtgcatgacccgcaagcccggtgcctga

SEQ ID NO: 21840 - DNA, 2517 bp, Artificial Sequence
  Synthetic Polynucleotide
atggccttaccagtgaccgccttgctcctgccgctggccttgctgctccacgccgccaggccggacatccagatgacacagagccctagcagcctgtctgccagcgtgggagacagagtgaccatcacatgcaaggccagcgaccacatcaacaactggctggcctggtatcagcagaagcctggacaggcccctaagctgctgatctacggcgctaccacactggaaacaggcgtgcccagcagattttctggcagcggctctggcaccgactacaccctgacaatatccagcctccagcctgaggacttcgccacctactactgtcagcagagctggaacaccccttggacattcggccagggcaccaagctggaaatcaagagactcgagaccatcttcctgccctctatcgccgagacaaagctccagaaggccggcacctacctgtgcctgctggaaaagttcttcccagatgtgattaagatccactggcaggaaaagaagtccaacaccatcctgggcagccaggaaggcaacaccatgaagaccaacgacacctacatgaagttcagctggctgaccgtgcccgagaagtccctggacaaagaacacagatgcatcgtgcggcacgaaaacaacaagaacggcgtggaccaggaaatcatcttcccacccatcaagaccgatgtgattacaatggaccccaaggacaactgctccaaggacgccaacgataccctgctgctccagctgaccaacaccagcgcctactacatgtacttgttgctgctgctgaagtccgtggtgtacttcgccatcatcacatgctgcctgctgcggagaaccgccttctgctgcaacggcgagaagtctagggccaagcgatctggatctggagcaacaaacttctcactactcaaacaagcaggtgacgtggaggagaatcccgggcctactagtatggactggatttggcgcatccttttccttgtcggcgctgctaccggcgcgcattccttcgaacaagttcagcttcaacagcctggcgctgagctggtcaaacctggcgcttctgtgaagatgagctgcaaagccagcggctacgccttcagcagctactggatcaactggatgaagcagaaacccggccagggactcgaatggatcggccaaatctatcccggcgacggcgacaccaactacaacggcaagttcaagggcagagccacactgaccgccgatacctctagcagcacagcctacatgcagctgagcagcctgaccagcgaagatagcgccgtgtacttctgtgcccggtccatcacaacagtcgtgggctgcgctatggactattggggccagggaacaagcgtgaccgtgtctagtacgcgtaacggcaccaacgtggcctgcctcgtgaaagagttctaccccaaggacatcaggatcaacctggtgtccagcaagaagatcaccgagttcgaccccgccatcgtgatctcccccagcggcaagtacaacgccgtgaagctggggaagtacgaggacagcaacagcgtgacctgctccgtgcagcacgacaacaagaccgtgcacagcaccgactttgaagtgaaaaccgactccaccgaccacgtgaagcccaaagagacagagaacaccaagcagcccagcaagagctgccacaagcccaaggccatcgtgcacaccgagaaagtgaacatgatgagcctgaccgtgctgggcctgcggatgctgttcgccaaaaccgtggccgtgaacttcctgctgaccgccaagctgttcttcctccgcgccaagagaagcggatctggcgtgaagcagaccctgaatttcgacctgctgaagctggctggcgacgtggaatccaacccaggcccttctagaggccatatgaccgagtacaagcccacggtgcgcctcgccacccgcgacgacgtccccagggccgtacgcaccctcgccgccgcgttcgccgactaccccgccacgcgccacaccgtcgatccggaccgccacatcgagcgggtcaccgagctgcaagaactcttcctcacgcgcgtcgggctcgacatcggcaaggtgtgggtcgcggacgacggcgccgcggtggcggtctggaccacgccggagagcgtcgaagcgggggcggtgttcgccgagatcggcccgcgcatggccgagttgagcggttcccggctggccgcgcagcaacagatggaaggcctcctggcgccgcaccggcccaaggagcccgcgtggttcctggccaccgtcggcgtctcgcccgaccaccagggcaagggtctgggcagcgccgtcgtgctccccggagtggaggcggccgagcgcgccggggtgcccgccttcctggagacctccgcgccccgcaacctccccttctacgagcggctcggcttcaccgtcaccgccgacgtcgaggtgcccgaaggaccgcgcacctggtgcatgacccgcaagcccggtgcctga

SEQ ID NO: 21841 - skipped

SEQ ID NO: 21842 - DNA, 1872 bp, Artificial Sequence
  Synthetic Polynucleotide
atggccttaccagtgaccgccttgctcctgccgctggccttgctgctccacgccgccaggccgagctacgtgctgacacagcctccatccgtgtctgtggctccaggacagaccgccagaatcacatgcggcggcaacaacatcggcagcaagagcgtgcactggtatcagcagccacctggacaggctccagtggtggtggtgtacgacgacagcgatagacctagcggcatccccgagagattcagcggcagcaattccggcaataccgccacactgaccatcagcagagtggaagctggcgacgaggccgtgtactactgccaagtgtgggacagcagcagcgatcacgtggtgtttggcggcggaacaaagctgacagtgcttctcgaggacctgaagaacgtgttcccacctgaggtggccgtgttcgagcctagcgaggccgagatcagccacacccagaaagccaccctcgtgtgcctggctaccggcttctaccccgaccatgtggaactgtcttggtgggtcaacggcaaagaggtgcacagcggcgtgtgtaccgacccccagccactgaaagaacagcccgccctgaacgacagccggtactgcctgagcagcagactgagagtgtccgccaccttctggcagaacccccggaaccacttcagatgccaggtgcagttctacggcctgagcgagaacgacgagtggacccaggacagagccaagcccgtgacccagatcgtgtctgccgaagcctggggcagagccgattgcggctttaccagcgagagctaccagcagggcgtgctgagcgccaccatcctgtacgagatcctgctgggcaaggccaccctgtacgccgtgctggtgtctgccctggtgctgatggctatggtcaagcggaaggacagccggggaagggccaagcgatctggatctggagcaacaaacttctcactactcaaacaagcaggtgacgtggaggagaatcccgggcctactagtatggactggatttggcgcatccttttccttgtcggcgctgctaccggcgcgcattccttcgaacaactccagctgcaagagtctggccctggcctggtcaagcctagcgaaacactgagcctgacctgtaccgtgtctggcggctctatcagctccggcagctatttctggggctggatcagacaacctcctggcaaaggactggaatggatcggctccatctactacagcggcatcacctactacaaccccagcctgaagtccagagtgaccatctccgtggacaccagcaagaaccagttctccctgaagctgagcagcgtgacagccgccgataccgccgtgtattattgtgccagacatgacggcgctgtggccggcctgtttgattattggggacagggcaccctggtcaccgtgtcatctgctacgcgtatccagaaccctgatcctgccgtgtaccagctgcgggatagcaagagcagcgacaagagcgtgtgtctgttcaccgacttcgacagccagaccaacgtgtcccagagcaaggactccgacgtgtacatcaccgataagtgcgtgctggacatgcggagcatggacttcaagagcaactccgccgtggcctggtccaacaagtccgatttcgcctgcgccaacgccttcaacaacagcattatccccgaggacacattcttcccaagccccgagagcagctgcgacgtgaagctggtggaaaagagcttcgagacagacaccaacctgaacttccagaacctgagcgtgatcggcttcagaatcctgctgctgaaagtggccggctttaacctgctgatgaccctgcggctgtggtccagctaa

SEQ ID NO: 21843 - DNA, 1872 bp, Artificial Sequence
  Synthetic Polynucleotide
atggccttaccagtgaccgccttgctcctgccgctggccttgctgctccacgccgccaggccgagctacgtgctgacacagcctccatccgtgtctgtggctccaggacagaccgccagaatcacatgcggcggcaagaacatcggcagcaagagcgtgcactggtatcagcagccacctggacaggctccagtggtggtggtgtacgacgacagcgatagacctagcggcatccccgagagattcagcggcagcaattccggcaataccgccacactgaccatcagcagagtggaagctggcgacgaggccgtgtactactgccaagtgtgggacagcagcagcgatcacgtggtgtttggcggcggaacaaagctgacagtgcttctcgaggacctgaagaacgtgttcccacctgaggtggccgtgttcgagcctagcgaggccgagatcagccacacccagaaagccaccctcgtgtgcctggctaccggcttctaccccgaccatgtggaactgtcttggtgggtcaacggcaaagaggtgcacagcggcgtgtgtaccgacccccagccactgaaagaacagcccgccctgaacgacagccggtactgcctgagcagcagactgagagtgtccgccaccttctggcagaacccccggaaccacttcagatgccaggtgcagttctacggcctgagcgagaacgacgagtggacccaggacagagccaagcccgtgacccagatcgtgtctgccgaagcctggggcagagccgattgcggctttaccagcgagagctaccagcagggcgtgctgagcgccaccatcctgtacgagatcctgctgggcaaggccaccctgtacgccgtgctggtgtctgccctggtgctgatggctatggtcaagcggaaggacagccggggaagggccaagcgatctggatctggagcaacaaacttctcactactcaaacaagcaggtgacgtggaggagaatcccgggcctactagtatggactggatttggcgcatccttttccttgtcggcgctgctaccggcgcgcattccttcgaacaactccagctgcaagagtctggccctggcctggtcaagcctagcgaaacactgagcctgacctgtaccgtgtctggcggctctatcagctccagcagctatttctggggctggatcagacaacctcctggcaaaggactggaatggatcggctccatctactacagcggcatcacctactacaaccccagcctgaagtccagagtgaccatctccgtggacaccagcaagaaccagttctccctgaagctgagcagcgtgacagccgccgataccgccgtgtattattgtgccagacatgacggcgctgtggccggcctgtttgattattggggacagggcaccctggtcaccgtgtcatctgctacgcgtatccagaaccctgatcctgccgtgtaccagctgcgggatagcaagagcagcgacaagagcgtgtgtctgttcaccgacttcgacagccagaccaacgtgtcccagagcaaggactccgacgtgtacatcaccgataagtgcgtgctggacatgcggagcatggacttcaagagcaactccgccgtggcctggtccaacaagtccgatttcgcctgcgccaacgccttcaacaacagcattatccccgaggacacattcttcccaagccccgagagcagctgcgacgtgaagctggtggaaaagagcttcgagacagacaccaacctgaacttccagaacctgagcgtgatcggcttcagaatcctgctgctgaaagtggccggctttaacctgctgatgaccctgcggctgtggtccagctaa

SEQ ID NO: 21844 - DNA, 1872 bp, Artificial Sequence
  Synthetic Polynucleotide
atggccttaccagtgaccgccttgctcctgccgctggccttgctgctccacgccgccaggccgagctacgtgctgacacagcctccatccgtgtctgtggctccaggacagaccgccagaatcacatgcggcggcaagaacatcggcagcaagagcgtgcactggtatcagcagccacctggacaggctccagtggtggtggtgtacgacgacagcgatagacctagcggcatccccgagagattcagcggcagcaattccggcaataccgccacactgaccatcagcagagtggaagctggcgacgaggccgtgtactactgccaagtgtgggacagcagcagcgatcacgtggtgtttggcggcggaacaaagctgacagtgcttctcgaggacctgaagaacgtgttcccacctgaggtggccgtgttcgagcctagcgaggccgagatcagccacacccagaaagccaccctcgtgtgcctggctaccggcttctaccccgaccatgtggaactgtcttggtgggtcaacggcaaagaggtgcacagcggcgtgtgtaccgacccccagccactgaaagaacagcccgccctgaacgacagccggtactgcctgagcagcagactgagagtgtccgccaccttctggcagaacccccggaaccacttcagatgccaggtgcagttctacggcctgagcgagaacgacgagtggacccaggacagagccaagcccgtgacccagatcgtgtctgccgaagcctggggcagagccgattgcggctttaccagcgagagctaccagcagggcgtgctgagcgccaccatcctgtacgagatcctgctgggcaaggccaccctgtacgccgtgctggtgtctgccctggtgctgatggctatggtcaagcggaaggacagccggggaagggccaagcgatctggatctggagcaacaaacttctcactactcaaacaagcaggtgacgtggaggagaatcccgggcctactagtatggactggatttggcgcatccttttccttgtcggcgctgctaccggcgcgcattccttcgaacaactccagctgcaagagtctggccctggcctggtcaagcctagcgaaacactgagcctgacctgtaccgtgtctggcggctctatcagctccggcagctatttctggggctggatcagacaacctcctggcaaaggactggaatggatcggctccatctactacagcggcagcacctactacaaccccagcctgaagtccagagtgaccatctccgtggacaccagcaagaaccagttctccctgaagctgagcagcgtgacagccgccgataccgccgtgtattattgtgccagacatgacggcgctgtggccggcctgtttgattattggggacagggcaccctggtcaccgtgtcatctgctacgcgtatccagaaccctgatcctgccgtgtaccagctgcgggatagcaagagcagcgacaagagcgtgtgtctgttcaccgacttcgacagccagaccaacgtgtcccagagcaaggactccgacgtgtacatcaccgataagtgcgtgctggacatgcggagcatggacttcaagagcaactccgccgtggcctggtccaacaagtccgatttcgcctgcgccaacgccttcaacaacagcattatccccgaggacacattcttcccaagccccgagagcagctgcgacgtgaagctggtggaaaagagcttcgagacagacaccaacctgaacttccagaacctgagcgtgatcggcttcagaatcctgctgctgaaagtggccggctttaacctgctgatgaccctgcggctgtggtccagctaa

SEQ ID NO: 21845 - DNA, 1872 bp, Artificial Sequence
  Synthetic Polynucleotide
atggccttaccagtgaccgccttgctcctgccgctggccttgctgctccacgccgccaggccgagctacgtgctgacacagcctccatccgtgtctgtggctccaggacagaccgccagaatcacatgcggcggcaagaacatcggcagcaagagcgtgcactggtatcagcagccacctggacaggctccagtggtggtggtgtacgacgacagcgatagacctagcggcatccccgagagattcagcggcagcaattccggcaataccgccacactgaccatcagcagagtggaagctggcgacgaggccgtgtactactgccaagtgtgggacagcagcagcgatcacgtggtgtttggcggcggaacaaagctgacagtgcttctcgaggacctgaagaacgtgttcccacctgaggtggccgtgttcgagcctagcgaggccgagatcagccacacccagaaagccaccctcgtgtgcctggctaccggcttctaccccgaccatgtggaactgtcttggtgggtcaacggcaaagaggtgcacagcggcgtgtgtaccgacccccagccactgaaagaacagcccgccctgaacgacagccggtactgcctgagcagcagactgagagtgtccgccaccttctggcagaacccccggaaccacttcagatgccaggtgcagttctacggcctgagcgagaacgacgagtggacccaggacagagccaagcccgtgacccagatcgtgtctgccgaagcctggggcagagccgattgcggctttaccagcgagagctaccagcagggcgtgctgagcgccaccatcctgtacgagatcctgctgggcaaggccaccctgtacgccgtgctggtgtctgccctggtgctgatggctatggtcaagcggaaggacagccggggaagggccaagcgatctggatctggagcaacaaacttctcactactcaaacaagcaggtgacgtggaggagaatcccgggcctactagtatggactggatttggcgcatccttttccttgtcggcgctgctaccggcgcgcattccttcgaacaactccagctgcaagagtctggccctggcctggtcaagcctagcgaaacactgagcctgacctgtaccgtgtctggcggctctatcagctccggcagctatttctggggctggatcagacaacctcctggcaaaggactggaatggatcggctccatctactacagcggcatcacctactacaaccccaccctgaagtccagagtgaccatctccgtggacaccagcaagaaccagttctccctgaagctgagcagcgtgacagccgccgataccgccgtgtattattgtgccagacatgacggcgctgtggccggcctgtttgattattggggacagggcaccctggtcaccgtgtcatctgctacgcgtatccagaaccctgatcctgccgtgtaccagctgcgggatagcaagagcagcgacaagagcgtgtgtctgttcaccgacttcgacagccagaccaacgtgtcccagagcaaggactccgacgtgtacatcaccgataagtgcgtgctggacatgcggagcatggacttcaagagcaactccgccgtggcctggtccaacaagtccgatttcgcctgcgccaacgccttcaacaacagcattatccccgaggacacattcttcccaagccccgagagcagctgcgacgtgaagctggtggaaaagagcttcgagacagacaccaacctgaacttccagaacctgagcgtgatcggcttcagaatcctgctgctgaaagtggccggctttaacctgctgatgaccctgcggctgtggtccagctaa

SEQ ID NO: 21846 - DNA, 1872 bp, Artificial Sequence
  Synthetic Polynucleotide
atggccttaccagtgaccgccttgctcctgccgctggccttgctgctccacgccgccaggccgagctacgtgctgacacagcctccatccgtgtctgtggctccaggacagaccgccagaatcacatgcggcggcaagaacatcggcagcaagagcgtgcactggtatcagcagccacctggacaggctccagtggtggtggtgtacgacgacagcgatagacctagcggcatccccgagagattcagcggcagcaattccggcaataccgccacactgaccatcagcagagtggaagctggcgacgaggccgtgtactactgccaagtgtgggacagcagcagcgatcacgtggtgtttggcggcggaacaaagctgacagtgcttctcgaggacctgaagaacgtgttcccacctgaggtggccgtgttcgagcctagcgaggccgagatcagccacacccagaaagccaccctcgtgtgcctggctaccggcttctaccccgaccatgtggaactgtcttggtgggtcaacggcaaagaggtgcacagcggcgtgtgtaccgacccccagccactgaaagaacagcccgccctgaacgacagccggtactgcctgagcagcagactgagagtgtccgccaccttctggcagaacccccggaaccacttcagatgccaggtgcagttctacggcctgagcgagaacgacgagtggacccaggacagagccaagcccgtgacccagatcgtgtctgccgaagcctggggcagagccgattgcggctttaccagcgagagctaccagcagggcgtgctgagcgccaccatcctgtacgagatcctgctgggcaaggccaccctgtacgccgtgctggtgtctgccctggtgctgatggctatggtcaagcggaaggacagccggggaagggccaagcgatctggatctggagcaacaaacttctcactactcaaacaagcaggtgacgtggaggagaatcccgggcctactagtatggactggatttggcgcatccttttccttgtcggcgctgctaccggcgcgcattccttcgaacaactccagctgcaagagtctggccctggcctggtcaagcctagcgaaacactgagcctgacctgtaccgtgtctggcggctctatcagctccggcagctatttctggggctggatcagacaacctcctggcaaaggactggaatggatcggctccatctactacagcggcatcacctactacaaccccagcctgaagtccagagtgaccatctccgtggacaccagcaagaaccagttctccctgaagctgagcagcgtgacagccgccgataccgccgtgtattattgtgccagacatgacggcgctgtggccggcctgtttgattattggggacagggcaccctggtcaccgtgtcatctgctacgcgtatccagaaccctgatcctgccgtgtaccagctgcgggatagcaagagcagcgacaagagcgtgtgtctgttcaccgacttcgacagccagaccaacgtgtcccagagcaaggactccgacgtgtacatcaccgataagtgcgtgctggacatgcggagcatggacttcaagagcaactccgccgtggcctggtccaacaagtccgatttcgcctgcgccaacgccttcaacaacagcattatccccgaggacacattcttcccaagccccgagagcagctgcgacgtgaagctggtggaaaagagcttcgagacagacaccaacctgaacttccagaacctgagcgtgatcggcttcagaatcctgctgctgaaagtggccggctttaacctgctgatgaccctgcggctgtggtccagctaa

SEQ ID NO: 21847 - DNA, 1872 bp, Artificial Sequence
  Synthetic Polynucleotide
atggccttaccagtgaccgccttgctcctgccgctggccttgctgctccacgccgccaggccgagctacgtgctgacacagcctccatccgtgtctgtggctccaggacagaccgccagaatcacatgcggcggcaacaacatcggcggcaagagcgtgcactggtatcagcagccacctggacaggctccagtggtggtggtgtacgacgacagcgatagacctagcggcatccccgagagattcagcggcagcaattccggcaataccgccacactgaccatcagcagagtggaagctggcgacgaggccgtgtactactgccaagtgtgggacagcagcagcgatcacgtggtgtttggcggcggaacaaagctgacagtgcttctcgaggacctgaagaacgtgttcccacctgaggtggccgtgttcgagcctagcgaggccgagatcagccacacccagaaagccaccctcgtgtgcctggctaccggcttctaccccgaccatgtggaactgtcttggtgggtcaacggcaaagaggtgcacagcggcgtgtgtaccgacccccagccactgaaagaacagcccgccctgaacgacagccggtactgcctgagcagcagactgagagtgtccgccaccttctggcagaacccccggaaccacttcagatgccaggtgcagttctacggcctgagcgagaacgacgagtggacccaggacagagccaagcccgtgacccagatcgtgtctgccgaagcctggggcagagccgattgcggctttaccagcgagagctaccagcagggcgtgctgagcgccaccatcctgtacgagatcctgctgggcaaggccaccctgtacgccgtgctggtgtctgccctggtgctgatggctatggtcaagcggaaggacagccggggaagggccaagcgatctggatctggagcaacaaacttctcactactcaaacaagcaggtgacgtggaggagaatcccgggcctactagtatggactggatttggcgcatccttttccttgtcggcgctgctaccggcgcgcattccttcgaacaactccagctgcaagagtctggccctggcctggtcaagcctagcgaaacactgagcctgacctgtaccgtgtctggcggctctatcagctccggcagctatttctggggctggatcagacaacctcctggcaaaggactggaatggatcggctccatctactacagcggcagcacctactacaaccccagcctgaagtccagagtgaccatctccgtggacaccagcaagaaccagttctccctgaagctgagcagcgtgacagccgccgataccgccgtgtattattgtgccagacatgacggcgctgtggccggcctgtttgattattggggacagggcaccctggtcaccgtgtcatctgctacgcgtatccagaaccctgatcctgccgtgtaccagctgcgggatagcaagagcagcgacaagagcgtgtgtctgttcaccgacttcgacagccagaccaacgtgtcccagagcaaggactccgacgtgtacatcaccgataagtgcgtgctggacatgcggagcatggacttcaagagcaactccgccgtggcctggtccaacaagtccgatttcgcctgcgccaacgccttcaacaacagcattatccccgaggacacattcttcccaagccccgagagcagctgcgacgtgaagctggtggaaaagagcttcgagacagacaccaacctgaacttccagaacctgagcgtgatcggcttcagaatcctgctgctgaaagtggccggctttaacctgctgatgaccctgcggctgtggtccagctaa

SEQ ID NO: 21848 - DNA, 1872 bp, Artificial Sequence
  Synthetic Polynucleotide
atggccttaccagtgaccgccttgctcctgccgctggccttgctgctccacgccgccaggccgagctacgtgctgacacagcctccatccgtgtctgtggctccaggacagaccgccagaatcacatgcggcggcaacaacatcggcggcaagagcgtgcactggtatcagcagccacctggacaggctccagtggtggtggtgtacgacgacagcgatagacctagcggcatccccgagagattcagcggcagcaattccggcaataccgccacactgaccatcagcagagtggaagctggcgacgaggccgtgtactactgccaagtgtgggacagcagcagcgatcacgtggtgtttggcggcggaacaaagctgacagtgcttctcgaggacctgaagaacgtgttcccacctgaggtggccgtgttcgagcctagcgaggccgagatcagccacacccagaaagccaccctcgtgtgcctggctaccggcttctaccccgaccatgtggaactgtcttggtgggtcaacggcaaagaggtgcacagcggcgtgtgtaccgacccccagccactgaaagaacagcccgccctgaacgacagccggtactgcctgagcagcagactgagagtgtccgccaccttctggcagaacccccggaaccacttcagatgccaggtgcagttctacggcctgagcgagaacgacgagtggacccaggacagagccaagcccgtgacccagatcgtgtctgccgaagcctggggcagagccgattgcggctttaccagcgagagctaccagcagggcgtgctgagcgccaccatcctgtacgagatcctgctgggcaaggccaccctgtacgccgtgctggtgtctgccctggtgctgatggctatggtcaagcggaaggacagccggggaagggccaagcgatctggatctggagcaacaaacttctcactactcaaacaagcaggtgacgtggaggagaatcccgggcctactagtatggactggatttggcgcatccttttccttgtcggcgctgctaccggcgcgcattccttcgaacaactccagctgcaagagtctggccctggcctggtcaagcctagcgaaacactgagcctgacctgtaccgtgtctggcggctctatcagctccggcagctatttctggggctggatcagacaacctcctggcaaaggactggaatggatcggctccatctactacagcggcatcacctactacaaccccaccctgaagtccagagtgaccatctccgtggacaccagcaagaaccagttctccctgaagctgagcagcgtgacagccgccgataccgccgtgtattattgtgccagacatgacggcgctgtggccggcctgtttgattattggggacagggcaccctggtcaccgtgtcatctgctacgcgtatccagaaccctgatcctgccgtgtaccagctgcgggatagcaagagcagcgacaagagcgtgtgtctgttcaccgacttcgacagccagaccaacgtgtcccagagcaaggactccgacgtgtacatcaccgataagtgcgtgctggacatgcggagcatggacttcaagagcaactccgccgtggcctggtccaacaagtccgatttcgcctgcgccaacgccttcaacaacagcattatccccgaggacacattcttcccaagccccgagagcagctgcgacgtgaagctggtggaaaagagcttcgagacagacaccaacctgaacttccagaacctgagcgtgatcggcttcagaatcctgctgctgaaagtggccggctttaacctgctgatgaccctgcggctgtggtccagctaa

SEQ ID NO: 21849 - DNA, 1872 bp, Artificial Sequence
  Synthetic Polynucleotide
atggccttaccagtgaccgccttgctcctgccgctggccttgctgctccacgccgccaggccgagctacgtgctgacacagcctccatccgtgtctgtggctccaggacagaccgccagaatcacatgcggcggcaacaacatcggcggcaagagcgtgcactggtatcagcagccacctggacaggctccagtggtggtggtgtacgacgacagcgatagacctagcggcatccccgagagattcagcggcagcaattccggcaataccgccacactgaccatcagcagagtggaagctggcgacgaggccgtgtactactgccaagtgtgggacagcagcagcgatcacgtggtgtttggcggcggaacaaagctgacagtgcttctcgaggacctgaagaacgtgttcccacctgaggtggccgtgttcgagcctagcgaggccgagatcagccacacccagaaagccaccctcgtgtgcctggctaccggcttctaccccgaccatgtggaactgtcttggtgggtcaacggcaaagaggtgcacagcggcgtgtgtaccgacccccagccactgaaagaacagcccgccctgaacgacagccggtactgcctgagcagcagactgagagtgtccgccaccttctggcagaacccccggaaccacttcagatgccaggtgcagttctacggcctgagcgagaacgacgagtggacccaggacagagccaagcccgtgacccagatcgtgtctgccgaagcctggggcagagccgattgcggctttaccagcgagagctaccagcagggcgtgctgagcgccaccatcctgtacgagatcctgctgggcaaggccaccctgtacgccgtgctggtgtctgccctggtgctgatggctatggtcaagcggaaggacagccggggaagggccaagcgatctggatctggagcaacaaacttctcactactcaaacaagcaggtgacgtggaggagaatcccgggcctactagtatggactggatttggcgcatccttttccttgtcggcgctgctaccggcgcgcattccttcgaacaactccagctgcaagagtctggccctggcctggtcaagcctagcgaaacactgagcctgacctgtaccgtgtctggcggctctatcagctccggcagctatttctggggctggatcagacaacctcctggcaaaggactggaatggatcggctccatctactacagcggcatcacctactacaaccccagcctgaagtccagagtgaccatctccgtggacaccagcaagaaccagttctccctgaagctgagcagcgtgacagccgccgataccgccgtgtattattgtgccagacatgacggcgctgtggccggcctgtttgattattggggacagggcaccctggtcaccgtgtcatctgctacgcgtatccagaaccctgatcctgccgtgtaccagctgcgggatagcaagagcagcgacaagagcgtgtgtctgttcaccgacttcgacagccagaccaacgtgtcccagagcaaggactccgacgtgtacatcaccgataagtgcgtgctggacatgcggagcatggacttcaagagcaactccgccgtggcctggtccaacaagtccgatttcgcctgcgccaacgccttcaacaacagcattatccccgaggacacattcttcccaagccccgagagcagctgcgacgtgaagctggtggaaaagagcttcgagacagacaccaacctgaacttccagaacctgagcgtgatcggcttcagaatcctgctgctgaaagtggccggctttaacctgctgatgaccctgcggctgtggtccagctaa

SEQ ID NO: 21850 - DNA, 1872 bp, Artificial Sequence
  Synthetic Polynucleotide
atggccttaccagtgaccgccttgctcctgccgctggccttgctgctccacgccgccaggccgagctacgtgctgacacagcctccatccgtgtctgtggctccaggacagaccgccagaatcacatgcggcggcaacaacctcggcagcaagagcgtgcactggtatcagcagccacctggacaggctccagtggtggtggtgtacgacgacagcgatagacctagcggcatccccgagagattcagcggcagcaattccggcaataccgccacactgaccatcagcagagtggaagctggcgacgaggccgtgtactactgccaagtgtgggacagcagcagcgatcacgtggtgtttggcggcggaacaaagctgacagtgcttctcgaggacctgaagaacgtgttcccacctgaggtggccgtgttcgagcctagcgaggccgagatcagccacacccagaaagccaccctcgtgtgcctggctaccggcttctaccccgaccatgtggaactgtcttggtgggtcaacggcaaagaggtgcacagcggcgtgtgtaccgacccccagccactgaaagaacagcccgccctgaacgacagccggtactgcctgagcagcagactgagagtgtccgccaccttctggcagaacccccggaaccacttcagatgccaggtgcagttctacggcctgagcgagaacgacgagtggacccaggacagagccaagcccgtgacccagatcgtgtctgccgaagcctggggcagagccgattgcggctttaccagcgagagctaccagcagggcgtgctgagcgccaccatcctgtacgagatcctgctgggcaaggccaccctgtacgccgtgctggtgtctgccctggtgctgatggctatggtcaagcggaaggacagccggggaagggccaagcgatctggatctggagcaacaaacttctcactactcaaacaagcaggtgacgtggaggagaatcccgggcctactagtatggactggatttggcgcatccttttccttgtcggcgctgctaccggcgcgcattccttcgaacaactccagctgcaagagtctggccctggcctggtcaagcctagcgaaacactgagcctgacctgtaccgtgtctggcggctctatcagctccagcagctatttctggggctggatcagacaacctcctggcaaaggactggaatggatcggctccatctactacagcggcatcacctactacaaccccagcctgaagtccagagtgaccatctccgtggacaccagcaagaaccagttctccctgaagctgagcagcgtgacagccgccgataccgccgtgtattattgtgccagacatgacggcgctgtggccggcctgtttgattattggggacagggcaccctggtcaccgtgtcatctgctacgcgtatccagaaccctgatcctgccgtgtaccagctgcgggatagcaagagcagcgacaagagcgtgtgtctgttcaccgacttcgacagccagaccaacgtgtcccagagcaaggactccgacgtgtacatcaccgataagtgcgtgctggacatgcggagcatggacttcaagagcaactccgccgtggcctggtccaacaagtccgatttcgcctgcgccaacgccttcaacaacagcattatccccgaggacacattcttcccaagccccgagagcagctgcgacgtgaagctggtggaaaagagcttcgagacagacaccaacctgaacttccagaacctgagcgtgatcggcttcagaatcctgctgctgaaagtggccggctttaacctgctgatgaccctgcggctgtggtccagctaa

SEQ ID NO: 21851 - DNA, 1872 bp, Artificial Sequence
  Synthetic Polynucleotide
atggccttaccagtgaccgccttgctcctgccgctggccttgctgctccacgccgccaggccgagctacgtgctgacacagcctccatccgtgtctgtggctccaggacagaccgccagaatcacatgcggcggcaacaacctcggcagcaagagcgtgcactggtatcagcagccacctggacaggctccagtggtggtggtgtacgacgacagcgatagacctagcggcatccccgagagattcagcggcagcaattccggcaataccgccacactgaccatcagcagagtggaagctggcgacgaggccgtgtactactgccaagtgtgggacagcagcagcgatcacgtggtgtttggcggcggaacaaagctgacagtgcttctcgaggacctgaagaacgtgttcccacctgaggtggccgtgttcgagcctagcgaggccgagatcagccacacccagaaagccaccctcgtgtgcctggctaccggcttctaccccgaccatgtggaactgtcttggtgggtcaacggcaaagaggtgcacagcggcgtgtgtaccgacccccagccactgaaagaacagcccgccctgaacgacagccggtactgcctgagcagcagactgagagtgtccgccaccttctggcagaacccccggaaccacttcagatgccaggtgcagttctacggcctgagcgagaacgacgagtggacccaggacagagccaagcccgtgacccagatcgtgtctgccgaagcctggggcagagccgattgcggctttaccagcgagagctaccagcagggcgtgctgagcgccaccatcctgtacgagatcctgctgggcaaggccaccctgtacgccgtgctggtgtctgccctggtgctgatggctatggtcaagcggaaggacagccggggaagggccaagcgatctggatctggagcaacaaacttctcactactcaaacaagcaggtgacgtggaggagaatcccgggcctactagtatggactggatttggcgcatccttttccttgtcggcgctgctaccggcgcgcattccttcgaacaactccagctgcaagagtctggccctggcctggtcaagcctagcgaaacactgagcctgacctgtaccgtgtctggcggctctatcagctccggcagctatttctggggctggatcagacaacctcctggcaaaggactggaatggatcggctccatctactacagcggcagcacctactacaaccccagcctgaagtccagagtgaccatctccgtggacaccagcaagaaccagttctccctgaagctgagcagcgtgacagccgccgataccgccgtgtattattgtgccagacatgacggcgctgtggccggcctgtttgattattggggacagggcaccctggtcaccgtgtcatctgctacgcgtatccagaaccctgatcctgccgtgtaccagctgcgggatagcaagagcagcgacaagagcgtgtgtctgttcaccgacttcgacagccagaccaacgtgtcccagagcaaggactccgacgtgtacatcaccgataagtgcgtgctggacatgcggagcatggacttcaagagcaactccgccgtggcctggtccaacaagtccgatttcgcctgcgccaacgccttcaacaacagcattatccccgaggacacattcttcccaagccccgagagcagctgcgacgtgaagctggtggaaaagagcttcgagacagacaccaacctgaacttccagaacctgagcgtgatcggcttcagaatcctgctgctgaaagtggccggctttaacctgctgatgaccctgcggctgtggtccagctaa

SEQ ID NO: 21852 - DNA, 1872 bp, Artificial Sequence
  Synthetic Polynucleotide
atggccttaccagtgaccgccttgctcctgccgctggccttgctgctccacgccgccaggccgagctacgtgctgacacagcctccatccgtgtctgtggctccaggacagaccgccagaatcacatgcggcggcaacaacctcggcagcaagagcgtgcactggtatcagcagccacctggacaggctccagtggtggtggtgtacgacgacagcgatagacctagcggcatccccgagagattcagcggcagcaattccggcaataccgccacactgaccatcagcagagtggaagctggcgacgaggccgtgtactactgccaagtgtgggacagcagcagcgatcacgtggtgtttggcggcggaacaaagctgacagtgcttctcgaggacctgaagaacgtgttcccacctgaggtggccgtgttcgagcctagcgaggccgagatcagccacacccagaaagccaccctcgtgtgcctggctaccggcttctaccccgaccatgtggaactgtcttggtgggtcaacggcaaagaggtgcacagcggcgtgtgtaccgacccccagccactgaaagaacagcccgccctgaacgacagccggtactgcctgagcagcagactgagagtgtccgccaccttctggcagaacccccggaaccacttcagatgccaggtgcagttctacggcctgagcgagaacgacgagtggacccaggacagagccaagcccgtgacccagatcgtgtctgccgaagcctggggcagagccgattgcggctttaccagcgagagctaccagcagggcgtgctgagcgccaccatcctgtacgagatcctgctgggcaaggccaccctgtacgccgtgctggtgtctgccctggtgctgatggctatggtcaagcggaaggacagccggggaagggccaagcgatctggatctggagcaacaaacttctcactactcaaacaagcaggtgacgtggaggagaatcccgggcctactagtatggactggatttggcgcatccttttccttgtcggcgctgctaccggcgcgcattccttcgaacaactccagctgcaagagtctggccctggcctggtcaagcctagcgaaacactgagcctgacctgtaccgtgtctggcggctctatcagctccggcagctatttctggggctggatcagacaacctcctggcaaaggactggaatggatcggctccatctactacagcggcatcacctactacaaccccaccctgaagtccagagtgaccatctccgtggacaccagcaagaaccagttctccctgaagctgagcagcgtgacagccgccgataccgccgtgtattattgtgccagacatgacggcgctgtggccggcctgtttgattattggggacagggcaccctggtcaccgtgtcatctgctacgcgtatccagaaccctgatcctgccgtgtaccagctgcgggatagcaagagcagcgacaagagcgtgtgtctgttcaccgacttcgacagccagaccaacgtgtcccagagcaaggactccgacgtgtacatcaccgataagtgcgtgctggacatgcggagcatggacttcaagagcaactccgccgtggcctggtccaacaagtccgatttcgcctgcgccaacgccttcaacaacagcattatccccgaggacacattcttcccaagccccgagagcagctgcgacgtgaagctggtggaaaagagcttcgagacagacaccaacctgaacttccagaacctgagcgtgatcggcttcagaatcctgctgctgaaagtggccggctttaacctgctgatgaccctgcggctgtggtccagctaa

SEQ ID NO: 21853 - DNA, 1872 bp, Artificial Sequence
  Synthetic Polynucleotide
atggccttaccagtgaccgccttgctcctgccgctggccttgctgctccacgccgccaggccgagctacgtgctgacacagcctccatccgtgtctgtggctccaggacagaccgccagaatcacatgcggcggcaacaacatcggcggcaagagcgtgcactggtatcagcagccacctggacaggctccagtggtggtggtgtacgacgacagcgatagacctagcggcatccccgagagattcagcggcagcaattccggcaataccgccacactgaccatcagcagagtggaagctggcgacgaggccgtgtactactgccaagtgtgggacagcagcagcgatcacgtggtgtttggcggcggaacaaagctgacagtgcttctcgaggacctgaagaacgtgttcccacctgaggtggccgtgttcgagcctagcgaggccgagatcagccacacccagaaagccaccctcgtgtgcctggctaccggcttctaccccgaccatgtggaactgtcttggtgggtcaacggcaaagaggtgcacagcggcgtgtgtaccgacccccagccactgaaagaacagcccgccctgaacgacagccggtactgcctgagcagcagactgagagtgtccgccaccttctggcagaacccccggaaccacttcagatgccaggtgcagttctacggcctgagcgagaacgacgagtggacccaggacagagccaagcccgtgacccagatcgtgtctgccgaagcctggggcagagccgattgcggctttaccagcgagagctaccagcagggcgtgctgagcgccaccatcctgtacgagatcctgctgggcaaggccaccctgtacgccgtgctggtgtctgccctggtgctgatggctatggtcaagcggaaggacagccggggaagggccaagcgatctggatctggagcaacaaacttctcactactcaaacaagcaggtgacgtggaggagaatcccgggcctactagtatggactggatttggcgcatccttttccttgtcggcgctgctaccggcgcgcattccttcgaacaactccagctgcaagagtctggccctggcctggtcaagcctagcgaaacactgagcctgacctgtaccgtgtctggcggctctatcagctccagcagctatttctggggctggatcagacaacctcctggcaaaggactggaatggatcggctccatctactacagcggcatcacctactacaaccccagcctgaagtccagagtgaccatctccgtggacaccagcaagaaccagttctccctgaagctgagcagcgtgacagccgccgataccgccgtgtattattgtgccagacatgacggcgctgtggccggcctgtttgattattggggacagggcaccctggtcaccgtgtcatctgctacgcgtatccagaaccctgatcctgccgtgtaccagctgcgggatagcaagagcagcgacaagagcgtgtgtctgttcaccgacttcgacagccagaccaacgtgtcccagagcaaggactccgacgtgtacatcaccgataagtgcgtgctggacatgcggagcatggacttcaagagcaactccgccgtggcctggtccaacaagtccgatttcgcctgcgccaacgccttcaacaacagcattatccccgaggacacattcttcccaagccccgagagcagctgcgacgtgaagctggtggaaaagagcttcgagacagacaccaacctgaacttccagaacctgagcgtgatcggcttcagaatcctgctgctgaaagtggccggctttaacctgctgatgaccctgcggctgtggtccagctaa

SEQ ID NO: 21854 - DNA, 1953 bp, Artificial Sequence
  Synthetic Polynucleotide
atggccttaccagtgaccgccttgctcctgccgctggccttgctgctccacgccgccaggccgagctacgtgctgacacagcctccatccgtgtctgtggctccaggacagaccgccagaatcacatgcggcggcaacaacatcggcagcaagagcgtgcactggtatcagcagccacctggacaggctccagtggtggtggtgtacgacgacagcgatagacctagcggcatccccgagagattcagcggcagcaattccggcaataccgccacactgaccatcagcagagtggaagctggcgacgaggccgtgtactactgccaagtgtgggacagcagcagcgatcacgtggtgtttggcggcggaacaaagctgacagtgcttctcgagggctcaggcggaggcggaagtggaggcggaggcagtggcgaggacctgaagaacgtgttcccacctgaggtggccgtgttcgagcctagcgaggccgagatcagccacacccagaaagccaccctcgtgtgcctggctaccggcttctaccccgaccatgtggaactgtcttggtgggtcaacggcaaagaggtgcacagcggcgtgtgtaccgacccccagccactgaaagaacagcccgccctgaacgacagccggtactgcctgagcagcagactgagagtgtccgccaccttctggcagaacccccggaaccacttcagatgccaggtgcagttctacggcctgagcgagaacgacgagtggacccaggacagagccaagcccgtgacccagatcgtgtctgccgaagcctggggcagagccgattgcggctttaccagcgagagctaccagcagggcgtgctgagcgccaccatcctgtacgagatcctgctgggcaaggccaccctgtacgccgtgctggtgtctgccctggtgctgatggctatggtcaagcggaaggacagccggggaagggccaagcgatctggatctggagcaacaaacttctcactactcaaacaagcaggtgacgtggaggagaatcccgggcctactagtatggactggatttggcgcatccttttccttgtcggcgctgctaccggcgcgcattccttcgaacaactccagctgcaagagtctggccctggcctggtcaagcctagcgaaacactgagcctgacctgtaccgtgtctggcggctctatcagctccggcagctatttctggggctggatcagacaacctcctggcaaaggactggaatggatcggctccatctactacagcggcatcacctactacaaccccggcctgaagtccagagtgaccatctccgtggacaccagcaagaaccagttctccctgaagctgagcagcgtgacagccgccgataccgccgtgtattattgtgccagacatgacggcgctgtggccggcctgtttgattattggggacagggcaccctggtcaccgtgtcatctgctacgcgtgggtctggaggcggaggcagcggcggaggcgggagcggcatccagaaccctgatcctgccgtgtaccagctgcgggatagcaagagcagcgacaagagcgtgtgtctgttcaccgacttcgacagccagaccaacgtgtcccagagcaaggactccgacgtgtacatcaccgataagtgcgtgctggacatgcggagcatggacttcaagagcaactccgccgtggcctggtccaacaagtccgatttcgcctgcgccaacgccttcaacaacagcattatccccgaggacacattcttcccaagccccgagagcagctgcgacgtgaagctggtggaaaagagcttcgagacagacaccaacctgaacttccagaacctgagcgtgatcggcttcagaatcctgctgctgaaagtggccggctttaacctgctgatgaccctgcggctgtggtccagctaa

SEQ ID NO: 21855 - DNA, 1953 bp, Artificial Sequence
  Synthetic Polynucleotide
atggccttaccagtgaccgccttgctcctgccgctggccttgctgctccacgccgccaggccgagctacgtgctgacacagcctccatccgtgtctgtggctccaggacagaccgccagaatcacatgcggcggcaacaacatcggcagcaagagcgtgcactggtatcagcagccacctggacaggctccagtggtggtggtgtacgacgacagcgatagacctagcggcatccccgagagattcagcggcagcaattccggcaataccgccacactgaccatcagcagagtggaagctggcgacgaggccgtgtactactgccaagtgtgggacagcagcagcgatcacgtggtgtttggcggcggaacaaagctgacagtgcttctcgagggctcaggcggaggcggaagtggaggcggaggcagtggcgaggacctgaagaacgtgttcccacctgaggtggccgtgttcgagcctagcgaggccgagatcagccacacccagaaagccaccctcgtgtgcctggctaccggcttctaccccgaccatgtggaactgtcttggtgggtcaacggcaaagaggtgcacagcggcgtgtgtaccgacccccagccactgaaagaacagcccgccctgaacgacagccggtactgcctgagcagcagactgagagtgtccgccaccttctggcagaacccccggaaccacttcagatgccaggtgcagttctacggcctgagcgagaacgacgagtggacccaggacagagccaagcccgtgacccagatcgtgtctgccgaagcctggggcagagccgattgcggctttaccagcgagagctaccagcagggcgtgctgagcgccaccatcctgtacgagatcctgctgggcaaggccaccctgtacgccgtgctggtgtctgccctggtgctgatggctatggtcaagcggaaggacagccggggaagggccaagcgatctggatctggagcaacaaacttctcactactcaaacaagcaggtgacgtggaggagaatcccgggcctactagtatggactggatttggcgcatccttttccttgtcggcgctgctaccggcgcgcattccttcgaacaactccagctgcaagagtctggccctggcctggtcaagcctagcgaaacactgagcctgacctgtaccgtgtctggcggctctatcagctccggcagctatttctggggctggatcagacaacctcctggcaaaggactggaatggatcggctccatctactacagcggcatcacctactacaaccccaccctgaagtccagagtgaccatctccgtggacaccagcaagaaccagttctccctgaagctgagcagcgtgacagccgccgataccgccgtgtattattgtgccagacatgacggcgctgtggccggcctgtttgattattggggacagggcaccctggtcaccgtgtcatctgctacgcgtgggtctggaggcggaggcagcggcggaggcgggagcggcatccagaaccctgatcctgccgtgtaccagctgcgggatagcaagagcagcgacaagagcgtgtgtctgttcaccgacttcgacagccagaccaacgtgtcccagagcaaggactccgacgtgtacatcaccgataagtgcgtgctggacatgcggagcatggacttcaagagcaactccgccgtggcctggtccaacaagtccgatttcgcctgcgccaacgccttcaacaacagcattatccccgaggacacattcttcccaagccccgagagcagctgcgacgtgaagctggtggaaaagagcttcgagacagacaccaacctgaacttccagaacctgagcgtgatcggcttcagaatcctgctgctgaaagtggccggctttaacctgctgatgaccctgcggctgtggtccagctaa

SEQ ID NO: 21856 - DNA, 1953 bp, Artificial Sequence
  Synthetic Polynucleotide
atggccttaccagtgaccgccttgctcctgccgctggccttgctgctccacgccgccaggccgagctacgtgctgacacagcctccatccgtgtctgtggctccaggacagaccgccagaatcacatgcggcggcaagaacatcggcagcaagagcgtgcactggtatcagcagccacctggacaggctccagtggtggtggtgtacgacgacagcgatagacctagcggcatccccgagagattcagcggcagcaattccggcaataccgccacactgaccatcagcagagtggaagctggcgacgaggccgtgtactactgccaagtgtgggacagcagcagcgatcacgtggtgtttggcggcggaacaaagctgacagtgcttctcgagggctcaggcggaggcggaagtggaggcggaggcagtggcgaggacctgaagaacgtgttcccacctgaggtggccgtgttcgagcctagcgaggccgagatcagccacacccagaaagccaccctcgtgtgcctggctaccggcttctaccccgaccatgtggaactgtcttggtgggtcaacggcaaagaggtgcacagcggcgtgtgtaccgacccccagccactgaaagaacagcccgccctgaacgacagccggtactgcctgagcagcagactgagagtgtccgccaccttctggcagaacccccggaaccacttcagatgccaggtgcagttctacggcctgagcgagaacgacgagtggacccaggacagagccaagcccgtgacccagatcgtgtctgccgaagcctggggcagagccgattgcggctttaccagcgagagctaccagcagggcgtgctgagcgccaccatcctgtacgagatcctgctgggcaaggccaccctgtacgccgtgctggtgtctgccctggtgctgatggctatggtcaagcggaaggacagccggggaagggccaagcgatctggatctggagcaacaaacttctcactactcaaacaagcaggtgacgtggaggagaatcccgggcctactagtatggactggatttggcgcatccttttccttgtcggcgctgctaccggcgcgcattccttcgaacaactccagctgcaagagtctggccctggcctggtcaagcctagcgaaacactgagcctgacctgtaccgtgtctggcggctctatcagctccggcagctatttctggggctggatcagacaacctcctggcaaaggactggaatggatcggctccatctactacagcggcatcacctactacaaccccagcctgaagtccagagtgaccatctccgtggacaccagcaagaaccagttctccctgaagctgagcagcgtgacagccgccgataccgccgtgtattattgtgccagacatgacggcgctgtggccggcctgtttgattattggggacagggcaccctggtcaccgtgtcatctgctacgcgtgggtctggaggcggaggcagcggcggaggcgggagcggcatccagaaccctgatcctgccgtgtaccagctgcgggatagcaagagcagcgacaagagcgtgtgtctgttcaccgacttcgacagccagaccaacgtgtcccagagcaaggactccgacgtgtacatcaccgataagtgcgtgctggacatgcggagcatggacttcaagagcaactccgccgtggcctggtccaacaagtccgatttcgcctgcgccaacgccttcaacaacagcattatccccgaggacacattcttcccaagccccgagagcagctgcgacgtgaagctggtggaaaagagcttcgagacagacaccaacctgaacttccagaacctgagcgtgatcggcttcagaatcctgctgctgaaagtggccggctttaacctgctgatgaccctgcggctgtggtccagctaa

SEQ ID NO: 21857 - DNA, 1953 bp, Artificial Sequence
  Synthetic Polynucleotide
atggccttaccagtgaccgccttgctcctgccgctggccttgctgctccacgccgccaggccgagctacgtgctgacacagcctccatccgtgtctgtggctccaggacagaccgccagaatcacatgcggcggcaacaacatcggcggcaagagcgtgcactggtatcagcagccacctggacaggctccagtggtggtggtgtacgacgacagcgatagacctagcggcatccccgagagattcagcggcagcaattccggcaataccgccacactgaccatcagcagagtggaagctggcgacgaggccgtgtactactgccaagtgtgggacagcagcagcgatcacgtggtgtttggcggcggaacaaagctgacagtgcttctcgagggctcaggcggaggcggaagtggaggcggaggcagtggcgaggacctgaagaacgtgttcccacctgaggtggccgtgttcgagcctagcgaggccgagatcagccacacccagaaagccaccctcgtgtgcctggctaccggcttctaccccgaccatgtggaactgtcttggtgggtcaacggcaaagaggtgcacagcggcgtgtgtaccgacccccagccactgaaagaacagcccgccctgaacgacagccggtactgcctgagcagcagactgagagtgtccgccaccttctggcagaacccccggaaccacttcagatgccaggtgcagttctacggcctgagcgagaacgacgagtggacccaggacagagccaagcccgtgacccagatcgtgtctgccgaagcctggggcagagccgattgcggctttaccagcgagagctaccagcagggcgtgctgagcgccaccatcctgtacgagatcctgctgggcaaggccaccctgtacgccgtgctggtgtctgccctggtgctgatggctatggtcaagcggaaggacagccggggaagggccaagcgatctggatctggagcaacaaacttctcactactcaaacaagcaggtgacgtggaggagaatcccgggcctactagtatggactggatttggcgcatccttttccttgtcggcgctgctaccggcgcgcattccttcgaacaactccagctgcaagagtctggccctggcctggtcaagcctagcgaaacactgagcctgacctgtaccgtgtctggcggctctatcagctccggcagctatttctggggctggatcagacaacctcctggcaaaggactggaatggatcggctccatctactacagcggcatcacctactacaaccccagcctgaagtccagagtgaccatctccgtggacaccagcaagaaccagttctccctgaagctgagcagcgtgacagccgccgataccgccgtgtattattgtgccagacatgacggcgctgtggccggcctgtttgattattggggacagggcaccctggtcaccgtgtcatctgctacgcgtgggtctggaggcggaggcagcggcggaggcgggagcggcatccagaaccctgatcctgccgtgtaccagctgcgggatagcaagagcagcgacaagagcgtgtgtctgttcaccgacttcgacagccagaccaacgtgtcccagagcaaggactccgacgtgtacatcaccgataagtgcgtgctggacatgcggagcatggacttcaagagcaactccgccgtggcctggtccaacaagtccgatttcgcctgcgccaacgccttcaacaacagcattatccccgaggacacattcttcccaagccccgagagcagctgcgacgtgaagctggtggaaaagagcttcgagacagacaccaacctgaacttccagaacctgagcgtgatcggcttcagaatcctgctgctgaaagtggccggctttaacctgctgatgaccctgcggctgtggtccagctaa

SEQ ID NO: 21858 - DNA, 1953 bp, Artificial Sequence
  Synthetic Polynucleotide
atggccttaccagtgaccgccttgctcctgccgctggccttgctgctccacgccgccaggccgagctacgtgctgacacagcctccatccgtgtctgtggctccaggacagaccgccagaatcacatgcggcggcaacaacatcggcagcaagagcgtgcactggtatcagcagccacctggacaggctccagtggtggtggtgtacgacgacagcgatagacctagcggcatccccgagagattcagcggcagcaattccggcaataccgccacactgaccatcagcagagtggaagctggcgacgaggccgtgtactactgccaagtgtgggacagcagcagcgatcacgtggtgtttggcggcggaacaaagctgacagtgcttctcgagggctcaggcggaggcggaagtggaggcggaggcagtggcgaggacctgaagaacgtgttcccacctgaggtggccgtgttcgagcctagcgaggccgagatcagccacacccagaaagccaccctcgtgtgcctggctaccggcttctaccccgaccatgtggaactgtcttggtgggtcaacggcaaagaggtgcacagcggcgtgtgtaccgacccccagccactgaaagaacagcccgccctgaacgacagccggtactgcctgagcagcagactgagagtgtccgccaccttctggcagaacccccggaaccacttcagatgccaggtgcagttctacggcctgagcgagaacgacgagtggacccaggacagagccaagcccgtgacccagatcgtgtctgccgaagcctggggcagagccgattgcggctttaccagcgagagctaccagcagggcgtgctgagcgccaccatcctgtacgagatcctgctgggcaaggccaccctgtacgccgtgctggtgtctgccctggtgctgatggctatggtcaagcggaaggacagccggggaagggccaagcgatctggatctggagcaacaaacttctcactactcaaacaagcaggtgacgtggaggagaatcccgggcctactagtatggactggatttggcgcatccttttccttgtcggcgctgctaccggcgcgcattccttcgaacaactccagctgcaagagtctggccctggcctggtcaagcctagcgaaacactgagcctgacctgtaccgtgtctggcggctctatcagctccagcagctatttctggggctggatcagacaacctcctggcaaaggactggaatggatcggctccatctactacagcggcatcacctactacaaccccagcctgaagtccagagtgaccatctccgtggacaccagcaagaaccagttctccctgaagctgagcagcgtgacagccgccgataccgccgtgtattattgtgccagacatgacggcgctgtggccggcctgtttgattattggggacagggcaccctggtcaccgtgtcatctgctacgcgtgggtctggaggcggaggcagcggcggaggcgggagcggcatccagaaccctgatcctgccgtgtaccagctgcgggatagcaagagcagcgacaagagcgtgtgtctgttcaccgacttcgacagccagaccaacgtgtcccagagcaaggactccgacgtgtacatcaccgataagtgcgtgctggacatgcggagcatggacttcaagagcaactccgccgtggcctggtccaacaagtccgatttcgcctgcgccaacgccttcaacaacagcattatccccgaggacacattcttcccaagccccgagagcagctgcgacgtgaagctggtggaaaagagcttcgagacagacaccaacctgaacttccagaacctgagcgtgatcggcttcagaatcctgctgctgaaagtggccggctttaacctgctgatgaccctgcggctgtggtccagctaa

SEQ ID NO: 21859 - DNA, 1953 bp, Artificial Sequence
  Synthetic Polynucleotide
atggccttaccagtgaccgccttgctcctgccgctggccttgctgctccacgccgccaggccgagctacgtgctgacacagcctccatccgtgtctgtggctccaggacagaccgccagaatcacatgcggcggcaacaacatcggcagcaagagcgtgcactggtatcagcagccacctggacaggctccagtggtggtggtgtacgacgacagcgatagacctagcggcatccccgagagattcagcggcagcaattccggcaataccgccacactgaccatcagcagagtggaagctggcgacgaggccgtgtactactgccaagtgtgggacagcagcagcgatcacgtggtgtttggcggcggaacaaagctgacagtgcttctcgagggctcaggcggaggcggaagtggaggcggaggcagtggcgaggacctgaagaacgtgttcccacctgaggtggccgtgttcgagcctagcgaggccgagatcagccacacccagaaagccaccctcgtgtgcctggctaccggcttctaccccgaccatgtggaactgtcttggtgggtcaacggcaaagaggtgcacagcggcgtgtgtaccgacccccagccactgaaagaacagcccgccctgaacgacagccggtactgcctgagcagcagactgagagtgtccgccaccttctggcagaacccccggaaccacttcagatgccaggtgcagttctacggcctgagcgagaacgacgagtggacccaggacagagccaagcccgtgacccagatcgtgtctgccgaagcctggggcagagccgattgcggctttaccagcgagagctaccagcagggcgtgctgagcgccaccatcctgtacgagatcctgctgggcaaggccaccctgtacgccgtgctggtgtctgccctggtgctgatggctatggtcaagcggaaggacagccggggaagggccaagcgatctggatctggagcaacaaacttctcactactcaaacaagcaggtgacgtggaggagaatcccgggcctactagtatggactggatttggcgcatccttttccttgtcggcgctgctaccggcgcgcattccttcgaacaactccagctgcaagagtctggccctggcctggtcaagcctagcgaaacactgagcctgacctgtaccgtgtctggcggctctatcagctccggcagctatatctggggctggatcagacaacctcctggcaaaggactggaatggatcggctccatctactacagcggcatcacctactacaaccccagcctgaagtccagagtgaccatctccgtggacaccagcaagaaccagttctccctgaagctgagcagcgtgacagccgccgataccgccgtgtattattgtgccagacatgacggcgctgtggccggcctgtttgattattggggacagggcaccctggtcaccgtgtcatctgctacgcgtgggtctggaggcggaggcagcggcggaggcgggagcggcatccagaaccctgatcctgccgtgtaccagctgcgggatagcaagagcagcgacaagagcgtgtgtctgttcaccgacttcgacagccagaccaacgtgtcccagagcaaggactccgacgtgtacatcaccgataagtgcgtgctggacatgcggagcatggacttcaagagcaactccgccgtggcctggtccaacaagtccgatttcgcctgcgccaacgccttcaacaacagcattatccccgaggacacattcttcccaagccccgagagcagctgcgacgtgaagctggtggaaaagagcttcgagacagacaccaacctgaacttccagaacctgagcgtgatcggcttcagaatcctgctgctgaaagtggccggctttaacctgctgatgaccctgcggctgtggtccagctaa

SEQ ID NO: 21860 - DNA, 1953 bp, Artificial Sequence
  Synthetic Polynucleotide
atggccttaccagtgaccgccttgctcctgccgctggccttgctgctccacgccgccaggccgagctacgtgctgacacagcctccatccgtgtctgtggctccaggacagaccgccagaatcacatgcggcggcaacaacatcggcagcaagagcgtgcactggtatcagcagccacctggacaggctccagtggtggtggtgtacgacgacagcgatagacctagcggcatccccgagagattcagcggcagcaattccggcaataccgccacactgaccatcagcagagtggaagctggcgacgaggccgtgtactactgccaagtgtgggacagcagcagcgatcacgtggtgtttggcggcggaacaaagctgacagtgcttctcgagggctcaggcggaggcggaagtggaggcggaggcagtggcgaggacctgaagaacgtgttcccacctgaggtggccgtgttcgagcctagcgaggccgagatcagccacacccagaaagccaccctcgtgtgcctggctaccggcttctaccccgaccatgtggaactgtcttggtgggtcaacggcaaagaggtgcacagcggcgtgtgtaccgacccccagccactgaaagaacagcccgccctgaacgacagccggtactgcctgagcagcagactgagagtgtccgccaccttctggcagaacccccggaaccacttcagatgccaggtgcagttctacggcctgagcgagaacgacgagtggacccaggacagagccaagcccgtgacccagatcgtgtctgccgaagcctggggcagagccgattgcggctttaccagcgagagctaccagcagggcgtgctgagcgccaccatcctgtacgagatcctgctgggcaaggccaccctgtacgccgtgctggtgtctgccctggtgctgatggctatggtcaagcggaaggacagccggggaagggccaagcgatctggatctggagcaacaaacttctcactactcaaacaagcaggtgacgtggaggagaatcccgggcctactagtatggactggatttggcgcatccttttccttgtcggcgctgctaccggcgcgcattccttcgaacaactccagctgcaagagtctggccctggcctggtcaagcctagcgaaacactgagcctgacctgtaccgtgtctggcggctctatcagctccggcagctatttctggggctggatcagacaacctcctggcaaaggactggaatggatcggctccatctactacagcggcatcagctactacaaccccagcctgaagtccagagtgaccatctccgtggacaccagcaagaaccagttctccctgaagctgagcagcgtgacagccgccgataccgccgtgtattattgtgccagacatgacggcgctgtggccggcctgtttgattattggggacagggcaccctggtcaccgtgtcatctgctacgcgtgggtctggaggcggaggcagcggcggaggcgggagcggcatccagaaccctgatcctgccgtgtaccagctgcgggatagcaagagcagcgacaagagcgtgtgtctgttcaccgacttcgacagccagaccaacgtgtcccagagcaaggactccgacgtgtacatcaccgataagtgcgtgctggacatgcggagcatggacttcaagagcaactccgccgtggcctggtccaacaagtccgatttcgcctgcgccaacgccttcaacaacagcattatccccgaggacacattcttcccaagccccgagagcagctgcgacgtgaagctggtggaaaagagcttcgagacagacaccaacctgaacttccagaacctgagcgtgatcggcttcagaatcctgctgctgaaagtggccggctttaacctgctgatgaccctgcggctgtggtccagctaa

SEQ ID NO: 21861 - DNA, 2571 bp, Artificial Sequence
  Synthetic Polynucleotide
atggccttaccagtgaccgccttgctcctgccgctggccttgctgctccacgccgccaggccgagctacgtgctgacacagcctccatccgtgtctgtggctccaggacagaccgccagaatcacatgcggcggcaacaacctcggcagcaagagcgtgcactggtatcagcagccacctggacaggctccagtggtggtggtgtacgacgacagcgatagacctagcggcatccccgagagattcagcggcagcaattccggcaataccgccacactgaccatcagcagagtggaagctggcgacgaggccgtgtactactgccaagtgtgggacagcagcagcgatcacgtggtgtttggcggcggaacaaagctgacagtgcttctcgaggacctgaagaacgtgttcccacctgaggtggccgtgttcgagcctagcgaggccgagatcagccacacccagaaagccaccctcgtgtgcctggctaccggcttctaccccgaccatgtggaactgtcttggtgggtcaacggcaaagaggtgcacagcggcgtgtgtaccgacccccagccactgaaagaacagcccgccctgaacgacagccggtactgcctgagcagcagactgagagtgtccgccaccttctggcagaacccccggaaccacttcagatgccaggtgcagttctacggcctgagcgagaacgacgagtggacccaggacagagccaagcccgtgacccagatcgtgtctgccgaagcctggggcagagccgattgcggctttaccagcgagagctaccagcagggcgtgctgagcgccaccatcctgtacgagatcctgctgggcaaggccaccctgtacgccgtgctggtgtctgccctggtgctgatggctatggtcaagcggaaggacagccggggaagggccaagcgatctggatctggagcaacaaacttctcactactcaaacaagcaggtgacgtggaggagaatcccgggcctactagtatggactggatttggcgcatccttttccttgtcggcgctgctaccggcgcgcattccttcgaacaactccagctgcaagagtctggccctggcctggtcaagcctagcgaaacactgagcctgacctgtaccgtgtctggcggctctatcagctccagcagctatttctggggctggatcagacaacctcctggcaaaggactggaatggatcggctccatctactacagcggcatcacctactacaaccccagcctgaagtccagagtgaccatctccgtggacaccagcaagaaccagttctccctgaagctgagcagcgtgacagccgccgataccgccgtgtattattgtgccagacatgacggcgctgtggccggcctgtttgattattggggacagggcaccctggtcaccgtgtcatctgctacgcgtatccagaaccctgatcctgccgtgtaccagctgcgggatagcaagagcagcgacaagagcgtgtgtctgttcaccgacttcgacagccagaccaacgtgtcccagagcaaggactccgacgtgtacatcaccgataagtgcgtgctggacatgcggagcatggacttcaagagcaactccgccgtggcctggtccaacaagtccgatttcgcctgcgccaacgccttcaacaacagcattatccccgaggacacattcttcccaagccccgagagcagctgcgacgtgaagctggtggaaaagagcttcgagacagacaccaacctgaacttccagaacctgagcgtgatcggcttcagaatcctgctgctgaaagtggccggctttaacctgctgatgaccctgcggctgtggtccagccgcgccaagagaagcggatctggcgtgaagcagaccctgaatttcgacctgctgaagctggctggcgacgtggaatccaacccaggcccttctagaggccatatgaccgagtacaagcccacggtgcgcctcgccacccgcgacgacgtccccagggccgtacgcaccctcgccgccgcgttcgccgactaccccgccacgcgccacaccgtcgatccggaccgccacatcgagcgggtcaccgagctgcaagaactcttcctcacgcgcgtcgggctcgacatcggcaaggtgtgggtcgcggacgacggcgccgcggtggcggtctggaccacgccggagagcgtcgaagcgggggcggtgttcgccgagatcggcccgcgcatggccgagttgagcggttcccggctggccgcgcagcaacagatggaaggcctcctggcgccgcaccggcccaaggagcccgcgtggttcctggccaccgtcggcgtctcgcccgaccaccagggcaagggtctgggcagcgccgtcgtgctccccggagtggaggcggccgagcgcgccggggtgcccgccttcctggagacctccgcgccccgcaacctccccttctacgagcggctcggcttcaccgtcaccgccgacgtcgaggtgcccgaaggaccgcgcacctggtgcatgacccgcaagcccggtgcctga

SEQ ID NO: 21862 - DNA, 2571 bp, Artificial Sequence
  Synthetic Polynucleotide
atggccttaccagtgaccgccttgctcctgccgctggccttgctgctccacgccgccaggccgagctacgtgctgacacagcctccatccgtgtctgtggctccaggacagaccgccagaatcacatgcggcggcaacaacatcggcggcaagagcgtgcactggtatcagcagccacctggacaggctccagtggtggtggtgtacgacgacagcgatagacctagcggcatccccgagagattcagcggcagcaattccggcaataccgccacactgaccatcagcagagtggaagctggcgacgaggccgtgtactactgccaagtgtgggacagcagcagcgatcacgtggtgtttggcggcggaacaaagctgacagtgcttctcgaggacctgaagaacgtgttcccacctgaggtggccgtgttcgagcctagcgaggccgagatcagccacacccagaaagccaccctcgtgtgcctggctaccggcttctaccccgaccatgtggaactgtcttggtgggtcaacggcaaagaggtgcacagcggcgtgtgtaccgacccccagccactgaaagaacagcccgccctgaacgacagccggtactgcctgagcagcagactgagagtgtccgccaccttctggcagaacccccggaaccacttcagatgccaggtgcagttctacggcctgagcgagaacgacgagtggacccaggacagagccaagcccgtgacccagatcgtgtctgccgaagcctggggcagagccgattgcggctttaccagcgagagctaccagcagggcgtgctgagcgccaccatcctgtacgagatcctgctgggcaaggccaccctgtacgccgtgctggtgtctgccctggtgctgatggctatggtcaagcggaaggacagccggggaagggccaagcgatctggatctggagcaacaaacttctcactactcaaacaagcaggtgacgtggaggagaatcccgggcctactagtatggactggatttggcgcatccttttccttgtcggcgctgctaccggcgcgcattccttcgaacaactccagctgcaagagtctggccctggcctggtcaagcctagcgaaacactgagcctgacctgtaccgtgtctggcggctctatcagctccagcagctatttctggggctggatcagacaacctcctggcaaaggactggaatggatcggctccatctactacagcggcatcacctactacaaccccagcctgaagtccagagtgaccatctccgtggacaccagcaagaaccagttctccctgaagctgagcagcgtgacagccgccgataccgccgtgtattattgtgccagacatgacggcgctgtggccggcctgtttgattattggggacagggcaccctggtcaccgtgtcatctgctacgcgtatccagaaccctgatcctgccgtgtaccagctgcgggatagcaagagcagcgacaagagcgtgtgtctgttcaccgacttcgacagccagaccaacgtgtcccagagcaaggactccgacgtgtacatcaccgataagtgcgtgctggacatgcggagcatggacttcaagagcaactccgccgtggcctggtccaacaagtccgatttcgcctgcgccaacgccttcaacaacagcattatccccgaggacacattcttcccaagccccgagagcagctgcgacgtgaagctggtggaaaagagcttcgagacagacaccaacctgaacttccagaacctgagcgtgatcggcttcagaatcctgctgctgaaagtggccggctttaacctgctgatgaccctgcggctgtggtccagccgcgccaagagaagcggatctggcgtgaagcagaccctgaatttcgacctgctgaagctggctggcgacgtggaatccaacccaggcccttctagaggccatatgaccgagtacaagcccacggtgcgcctcgccacccgcgacgacgtccccagggccgtacgcaccctcgccgccgcgttcgccgactaccccgccacgcgccacaccgtcgatccggaccgccacatcgagcgggtcaccgagctgcaagaactcttcctcacgcgcgtcgggctcgacatcggcaaggtgtgggtcgcggacgacggcgccgcggtggcggtctggaccacgccggagagcgtcgaagcgggggcggtgttcgccgagatcggcccgcgcatggccgagttgagcggttcccggctggccgcgcagcaacagatggaaggcctcctggcgccgcaccggcccaaggagcccgcgtggttcctggccaccgtcggcgtctcgcccgaccaccagggcaagggtctgggcagcgccgtcgtgctccccggagtggaggcggccgagcgcgccggggtgcccgccttcctggagacctccgcgccccgcaacctccccttctacgagcggctcggcttcaccgtcaccgccgacgtcgaggtgcccgaaggaccgcgcacctggtgcatgacccgcaagcccggtgcctga

SEQ ID NO: 21863 - DNA, 2571 bp, Artificial Sequence
  Synthetic Polynucleotide
atggccttaccagtgaccgccttgctcctgccgctggccttgctgctccacgccgccaggccgagctacgtgctgacacagcctccatccgtgtctgtggctccaggacagaccgccagaatcacatgcggcggcaagaacatcggcagcaagagcgtgcactggtatcagcagccacctggacaggctccagtggtggtggtgtacgacgacagcgatagacctagcggcatccccgagagattcagcggcagcaattccggcaataccgccacactgaccatcagcagagtggaagctggcgacgaggccgtgtactactgccaagtgtgggacagcagcagcgatcacgtggtgtttggcggcggaacaaagctgacagtgcttctcgaggacctgaagaacgtgttcccacctgaggtggccgtgttcgagcctagcgaggccgagatcagccacacccagaaagccaccctcgtgtgcctggctaccggcttctaccccgaccatgtggaactgtcttggtgggtcaacggcaaagaggtgcacagcggcgtgtgtaccgacccccagccactgaaagaacagcccgccctgaacgacagccggtactgcctgagcagcagactgagagtgtccgccaccttctggcagaacccccggaaccacttcagatgccaggtgcagttctacggcctgagcgagaacgacgagtggacccaggacagagccaagcccgtgacccagatcgtgtctgccgaagcctggggcagagccgattgcggctttaccagcgagagctaccagcagggcgtgctgagcgccaccatcctgtacgagatcctgctgggcaaggccaccctgtacgccgtgctggtgtctgccctggtgctgatggctatggtcaagcggaaggacagccggggaagggccaagcgatctggatctggagcaacaaacttctcactactcaaacaagcaggtgacgtggaggagaatcccgggcctactagtatggactggatttggcgcatccttttccttgtcggcgctgctaccggcgcgcattccttcgaacaactccagctgcaagagtctggccctggcctggtcaagcctagcgaaacactgagcctgacctgtaccgtgtctggcggctctatcagctccggcagctatttctggggctggatcagacaacctcctggcaaaggactggaatggatcggctccatctactacagcggcatcacctactacaaccccagcctgaagtccagagtgaccatctccgtggacaccagcaagaaccagttctccctgaagctgagcagcgtgacagccgccgataccgccgtgtattattgtgccagacatgacggcgctgtggccggcctgtttgattattggggacagggcaccctggtcaccgtgtcatctgctacgcgtatccagaaccctgatcctgccgtgtaccagctgcgggatagcaagagcagcgacaagagcgtgtgtctgttcaccgacttcgacagccagaccaacgtgtcccagagcaaggactccgacgtgtacatcaccgataagtgcgtgctggacatgcggagcatggacttcaagagcaactccgccgtggcctggtccaacaagtccgatttcgcctgcgccaacgccttcaacaacagcattatccccgaggacacattcttcccaagccccgagagcagctgcgacgtgaagctggtggaaaagagcttcgagacagacaccaacctgaacttccagaacctgagcgtgatcggcttcagaatcctgctgctgaaagtggccggctttaacctgctgatgaccctgcggctgtggtccagccgcgccaagagaagcggatctggcgtgaagcagaccctgaatttcgacctgctgaagctggctggcgacgtggaatccaacccaggcccttctagaggccatatgaccgagtacaagcccacggtgcgcctcgccacccgcgacgacgtccccagggccgtacgcaccctcgccgccgcgttcgccgactaccccgccacgcgccacaccgtcgatccggaccgccacatcgagcgggtcaccgagctgcaagaactcttcctcacgcgcgtcgggctcgacatcggcaaggtgtgggtcgcggacgacggcgccgcggtggcggtctggaccacgccggagagcgtcgaagcgggggcggtgttcgccgagatcggcccgcgcatggccgagttgagcggttcccggctggccgcgcagcaacagatggaaggcctcctggcgccgcaccggcccaaggagcccgcgtggttcctggccaccgtcggcgtctcgcccgaccaccagggcaagggtctgggcagcgccgtcgtgctccccggagtggaggcggccgagcgcgccggggtgcccgccttcctggagacctccgcgccccgcaacctccccttctacgagcggctcggcttcaccgtcaccgccgacgtcgaggtgcccgaaggaccgcgcacctggtgcatgacccgcaagcccggtgcctga

SEQ ID NO: 21864 - DNA, 2571 bp, Artificial Sequence
  Synthetic Polynucleotide
atggccttaccagtgaccgccttgctcctgccgctggccttgctgctccacgccgccaggccgagctacgtgctgacacagcctccatccgtgtctgtggctccaggacagaccgccagaatcacatgcggcggcaacaacatcggcggcaagagcgtgcactggtatcagcagccacctggacaggctccagtggtggtggtgtacgacgacagcgatagacctagcggcatccccgagagattcagcggcagcaattccggcaataccgccacactgaccatcagcagagtggaagctggcgacgaggccgtgtactactgccaagtgtgggacagcagcagcgatcacgtggtgtttggcggcggaacaaagctgacagtgcttctcgaggacctgaagaacgtgttcccacctgaggtggccgtgttcgagcctagcgaggccgagatcagccacacccagaaagccaccctcgtgtgcctggctaccggcttctaccccgaccatgtggaactgtcttggtgggtcaacggcaaagaggtgcacagcggcgtgtgtaccgacccccagccactgaaagaacagcccgccctgaacgacagccggtactgcctgagcagcagactgagagtgtccgccaccttctggcagaacccccggaaccacttcagatgccaggtgcagttctacggcctgagcgagaacgacgagtggacccaggacagagccaagcccgtgacccagatcgtgtctgccgaagcctggggcagagccgattgcggctttaccagcgagagctaccagcagggcgtgctgagcgccaccatcctgtacgagatcctgctgggcaaggccaccctgtacgccgtgctggtgtctgccctggtgctgatggctatggtcaagcggaaggacagccggggaagggccaagcgatctggatctggagcaacaaacttctcactactcaaacaagcaggtgacgtggaggagaatcccgggcctactagtatggactggatttggcgcatccttttccttgtcggcgctgctaccggcgcgcattccttcgaacaactccagctgcaagagtctggccctggcctggtcaagcctagcgaaacactgagcctgacctgtaccgtgtctggcggctctatcagctccggcagctatttctggggctggatcagacaacctcctggcaaaggactggaatggatcggctccatctactacagcggcatcacctactacaaccccagcctgaagtccagagtgaccatctccgtggacaccagcaagaaccagttctccctgaagctgagcagcgtgacagccgccgataccgccgtgtattattgtgccagacatgacggcgctgtggccggcctgtttgattattggggacagggcaccctggtcaccgtgtcatctgctacgcgtatccagaaccctgatcctgccgtgtaccagctgcgggatagcaagagcagcgacaagagcgtgtgtctgttcaccgacttcgacagccagaccaacgtgtcccagagcaaggactccgacgtgtacatcaccgataagtgcgtgctggacatgcggagcatggacttcaagagcaactccgccgtggcctggtccaacaagtccgatttcgcctgcgccaacgccttcaacaacagcattatccccgaggacacattcttcccaagccccgagagcagctgcgacgtgaagctggtggaaaagagcttcgagacagacaccaacctgaacttccagaacctgagcgtgatcggcttcagaatcctgctgctgaaagtggccggctttaacctgctgatgaccctgcggctgtggtccagccgcgccaagagaagcggatctggcgtgaagcagaccctgaatttcgacctgctgaagctggctggcgacgtggaatccaacccaggcccttctagaggccatatgaccgagtacaagcccacggtgcgcctcgccacccgcgacgacgtccccagggccgtacgcaccctcgccgccgcgttcgccgactaccccgccacgcgccacaccgtcgatccggaccgccacatcgagcgggtcaccgagctgcaagaactcttcctcacgcgcgtcgggctcgacatcggcaaggtgtgggtcgcggacgacggcgccgcggtggcggtctggaccacgccggagagcgtcgaagcgggggcggtgttcgccgagatcggcccgcgcatggccgagttgagcggttcccggctggccgcgcagcaacagatggaaggcctcctggcgccgcaccggcccaaggagcccgcgtggttcctggccaccgtcggcgtctcgcccgaccaccagggcaagggtctgggcagcgccgtcgtgctccccggagtggaggcggccgagcgcgccggggtgcccgccttcctggagacctccgcgccccgcaacctccccttctacgagcggctcggcttcaccgtcaccgccgacgtcgaggtgcccgaaggaccgcgcacctggtgcatgacccgcaagcccggtgcctga

SEQ ID NO: 21865 - DNA, 2571 bp, Artificial Sequence
  Synthetic Polynucleotide
atggccttaccagtgaccgccttgctcctgccgctggccttgctgctccacgccgccaggccgagctacgtgctgacacagcctccatccgtgtctgtggctccaggacagaccgccagaatcacatgcggcggcaacaacctcggcagcaagagcgtgcactggtatcagcagccacctggacaggctccagtggtggtggtgtacgacgacagcgatagacctagcggcatccccgagagattcagcggcagcaattccggcaataccgccacactgaccatcagcagagtggaagctggcgacgaggccgtgtactactgccaagtgtgggacagcagcagcgatcacgtggtgtttggcggcggaacaaagctgacagtgcttctcgaggacctgaagaacgtgttcccacctgaggtggccgtgttcgagcctagcgaggccgagatcagccacacccagaaagccaccctcgtgtgcctggctaccggcttctaccccgaccatgtggaactgtcttggtgggtcaacggcaaagaggtgcacagcggcgtgtgtaccgacccccagccactgaaagaacagcccgccctgaacgacagccggtactgcctgagcagcagactgagagtgtccgccaccttctggcagaacccccggaaccacttcagatgccaggtgcagttctacggcctgagcgagaacgacgagtggacccaggacagagccaagcccgtgacccagatcgtgtctgccgaagcctggggcagagccgattgcggctttaccagcgagagctaccagcagggcgtgctgagcgccaccatcctgtacgagatcctgctgggcaaggccaccctgtacgccgtgctggtgtctgccctggtgctgatggctatggtcaagcggaaggacagccggggaagggccaagcgatctggatctggagcaacaaacttctcactactcaaacaagcaggtgacgtggaggagaatcccgggcctactagtatggactggatttggcgcatccttttccttgtcggcgctgctaccggcgcgcattccttcgaacaactccagctgcaagagtctggccctggcctggtcaagcctagcgaaacactgagcctgacctgtaccgtgtctggcggctctatcagctccggcagctatttctggggctggatcagacaacctcctggcaaaggactggaatggatcggctccatctactacagcggcatcacctactacaaccccagcctgaagtccagagtgaccatctccgtggacaccagcaagaaccagttctccctgaagctgagcagcgtgacagccgccgataccgccgtgtattattgtgccagacatgacggcgctgtggccggcctgtttgattattggggacagggcaccctggtcaccgtgtcatctgctacgcgtatccagaaccctgatcctgccgtgtaccagctgcgggatagcaagagcagcgacaagagcgtgtgtctgttcaccgacttcgacagccagaccaacgtgtcccagagcaaggactccgacgtgtacatcaccgataagtgcgtgctggacatgcggagcatggacttcaagagcaactccgccgtggcctggtccaacaagtccgatttcgcctgcgccaacgccttcaacaacagcattatccccgaggacacattcttcccaagccccgagagcagctgcgacgtgaagctggtggaaaagagcttcgagacagacaccaacctgaacttccagaacctgagcgtgatcggcttcagaatcctgctgctgaaagtggccggctttaacctgctgatgaccctgcggctgtggtccagccgcgccaagagaagcggatctggcgtgaagcagaccctgaatttcgacctgctgaagctggctggcgacgtggaatccaacccaggcccttctagaggccatatgaccgagtacaagcccacggtgcgcctcgccacccgcgacgacgtccccagggccgtacgcaccctcgccgccgcgttcgccgactaccccgccacgcgccacaccgtcgatccggaccgccacatcgagcgggtcaccgagctgcaagaactcttcctcacgcgcgtcgggctcgacatcggcaaggtgtgggtcgcggacgacggcgccgcggtggcggtctggaccacgccggagagcgtcgaagcgggggcggtgttcgccgagatcggcccgcgcatggccgagttgagcggttcccggctggccgcgcagcaacagatggaaggcctcctggcgccgcaccggcccaaggagcccgcgtggttcctggccaccgtcggcgtctcgcccgaccaccagggcaagggtctgggcagcgccgtcgtgctccccggagtggaggcggccgagcgcgccggggtgcccgccttcctggagacctccgcgccccgcaacctccccttctacgagcggctcggcttcaccgtcaccgccgacgtcgaggtgcccgaaggaccgcgcacctggtgcatgacccgcaagcccggtgcctga

SEQ ID NO: 21866 - DNA, 2571 bp, Artificial Sequence
  Synthetic Polynucleotide
atggccttaccagtgaccgccttgctcctgccgctggccttgctgctccacgccgccaggccgagctacgtgctgacacagcctccatccgtgtctgtggctccaggacagaccgccagaatcacatgcggcggcaacaacatcggcagcaagagcgtgcactggtatcagcagccacctggacaggctccagtggtggtggtgtacgacgacagcgatagacctagcggcatccccgagagattcagcggcagcaattccggcaataccgccacactgaccatcagcagagtggaagctggcgacgaggccgtgtactactgccaagtgtgggacagcagcagcgatcacgtggtgtttggcggcggaacaaagctgacagtgcttctcgaggacctgaagaacgtgttcccacctgaggtggccgtgttcgagcctagcgaggccgagatcagccacacccagaaagccaccctcgtgtgcctggctaccggcttctaccccgaccatgtggaactgtcttggtgggtcaacggcaaagaggtgcacagcggcgtgtgtaccgacccccagccactgaaagaacagcccgccctgaacgacagccggtactgcctgagcagcagactgagagtgtccgccaccttctggcagaacccccggaaccacttcagatgccaggtgcagttctacggcctgagcgagaacgacgagtggacccaggacagagccaagcccgtgacccagatcgtgtctgccgaagcctggggcagagccgattgcggctttaccagcgagagctaccagcagggcgtgctgagcgccaccatcctgtacgagatcctgctgggcaaggccaccctgtacgccgtgctggtgtctgccctggtgctgatggctatggtcaagcggaaggacagccggggaagggccaagcgatctggatctggagcaacaaacttctcactactcaaacaagcaggtgacgtggaggagaatcccgggcctactagtatggactggatttggcgcatccttttccttgtcggcgctgctaccggcgcgcattccttcgaacaactccagctgcaagagtctggccctggcctggtcaagcctagcgaaacactgagcctgacctgtaccgtgtctggcggctctatcagctccagcagctatttctggggctggatcagacaacctcctggcaaaggactggaatggatcggctccatctactacagcggcatcacctactacaaccccagcctgaagtccagagtgaccatctccgtggacaccagcaagaaccagttctccctgaagctgagcagcgtgacagccgccgataccgccgtgtattattgtgccagacatgacggcgctgtggccggcctgtttgattattggggacagggcaccctggtcaccgtgtcatctgctacgcgtatccagaaccctgatcctgccgtgtaccagctgcgggatagcaagagcagcgacaagagcgtgtgtctgttcaccgacttcgacagccagaccaacgtgtcccagagcaaggactccgacgtgtacatcaccgataagtgcgtgctggacatgcggagcatggacttcaagagcaactccgccgtggcctggtccaacaagtccgatttcgcctgcgccaacgccttcaacaacagcattatccccgaggacacattcttcccaagccccgagagcagctgcgacgtgaagctggtggaaaagagcttcgagacagacaccaacctgaacttccagaacctgagcgtgatcggcttcagaatcctgctgctgaaagtggccggctttaacctgctgatgaccctgcggctgtggtccagccgcgccaagagaagcggatctggcgtgaagcagaccctgaatttcgacctgctgaagctggctggcgacgtggaatccaacccaggcccttctagaggccatatgaccgagtacaagcccacggtgcgcctcgccacccgcgacgacgtccccagggccgtacgcaccctcgccgccgcgttcgccgactaccccgccacgcgccacaccgtcgatccggaccgccacatcgagcgggtcaccgagctgcaagaactcttcctcacgcgcgtcgggctcgacatcggcaaggtgtgggtcgcggacgacggcgccgcggtggcggtctggaccacgccggagagcgtcgaagcgggggcggtgttcgccgagatcggcccgcgcatggccgagttgagcggttcccggctggccgcgcagcaacagatggaaggcctcctggcgccgcaccggcccaaggagcccgcgtggttcctggccaccgtcggcgtctcgcccgaccaccagggcaagggtctgggcagcgccgtcgtgctccccggagtggaggcggccgagcgcgccggggtgcccgccttcctggagacctccgcgccccgcaacctccccttctacgagcggctcggcttcaccgtcaccgccgacgtcgaggtgcccgaaggaccgcgcacctggtgcatgacccgcaagcccggtgcctga

SEQ ID NO: 21867 - DNA, 2571 bp, Artificial Sequence
  Synthetic Polynucleotide
atggccttaccagtgaccgccttgctcctgccgctggccttgctgctccacgccgccaggccgagctacgtgctgacacagcctccatccgtgtctgtggctccaggacagaccgccagaatcacatgcggcggcaacaacatcggcagcaagagcgtgcactggtatcagcagccacctggacaggctccagtggtggtggtgtacgacgacagcgatagacctagcggcatccccgagagattcagcggcagcaattccggcaataccgccacactgaccatcagcagagtggaagctggcgacgaggccgtgtactactgccaagtgtgggacagcagcagcgatcacgtggtgtttggcggcggaacaaagctgacagtgcttctcgaggacctgaagaacgtgttcccacctgaggtggccgtgttcgagcctagcgaggccgagatcagccacacccagaaagccaccctcgtgtgcctggctaccggcttctaccccgaccatgtggaactgtcttggtgggtcaacggcaaagaggtgcacagcggcgtgtgtaccgacccccagccactgaaagaacagcccgccctgaacgacagccggtactgcctgagcagcagactgagagtgtccgccaccttctggcagaacccccggaaccacttcagatgccaggtgcagttctacggcctgagcgagaacgacgagtggacccaggacagagccaagcccgtgacccagatcgtgtctgccgaagcctggggcagagccgattgcggctttaccagcgagagctaccagcagggcgtgctgagcgccaccatcctgtacgagatcctgctgggcaaggccaccctgtacgccgtgctggtgtctgccctggtgctgatggctatggtcaagcggaaggacagccggggaagggccaagcgatctggatctggagcaacaaacttctcactactcaaacaagcaggtgacgtggaggagaatcccgggcctactagtatggactggatttggcgcatccttttccttgtcggcgctgctaccggcgcgcattccttcgaacaactccagctgcaagagtctggccctggcctggtcaagcctagcgaaacactgagcctgacctgtaccgtgtctggcggctctatcagctccggcagctatatctggggctggatcagacaacctcctggcaaaggactggaatggatcggctccatctactacagcggcatcacctactacaaccccagcctgaagtccagagtgaccatctccgtggacaccagcaagaaccagttctccctgaagctgagcagcgtgacagccgccgataccgccgtgtattattgtgccagacatgacggcgctgtggccggcctgtttgattattggggacagggcaccctggtcaccgtgtcatctgctacgcgtatccagaaccctgatcctgccgtgtaccagctgcgggatagcaagagcagcgacaagagcgtgtgtctgttcaccgacttcgacagccagaccaacgtgtcccagagcaaggactccgacgtgtacatcaccgataagtgcgtgctggacatgcggagcatggacttcaagagcaactccgccgtggcctggtccaacaagtccgatttcgcctgcgccaacgccttcaacaacagcattatccccgaggacacattcttcccaagccccgagagcagctgcgacgtgaagctggtggaaaagagcttcgagacagacaccaacctgaacttccagaacctgagcgtgatcggcttcagaatcctgctgctgaaagtggccggctttaacctgctgatgaccctgcggctgtggtccagccgcgccaagagaagcggatctggcgtgaagcagaccctgaatttcgacctgctgaagctggctggcgacgtggaatccaacccaggcccttctagaggccatatgaccgagtacaagcccacggtgcgcctcgccacccgcgacgacgtccccagggccgtacgcaccctcgccgccgcgttcgccgactaccccgccacgcgccacaccgtcgatccggaccgccacatcgagcgggtcaccgagctgcaagaactcttcctcacgcgcgtcgggctcgacatcggcaaggtgtgggtcgcggacgacggcgccgcggtggcggtctggaccacgccggagagcgtcgaagcgggggcggtgttcgccgagatcggcccgcgcatggccgagttgagcggttcccggctggccgcgcagcaacagatggaaggcctcctggcgccgcaccggcccaaggagcccgcgtggttcctggccaccgtcggcgtctcgcccgaccaccagggcaagggtctgggcagcgccgtcgtgctccccggagtggaggcggccgagcgcgccggggtgcccgccttcctggagacctccgcgccccgcaacctccccttctacgagcggctcggcttcaccgtcaccgccgacgtcgaggtgcccgaaggaccgcgcacctggtgcatgacccgcaagcccggtgcctga

SEQ ID NO: 21868 - DNA, 2571 bp, Artificial Sequence
  Synthetic Polynucleotide
atggccttaccagtgaccgccttgctcctgccgctggccttgctgctccacgccgccaggccgagctacgtgctgacacagcctccatccgtgtctgtggctccaggacagaccgccagaatcacatgcggcggcaacaacatcggcagcaagagcgtgcactggtatcagcagccacctggacaggctccagtggtggtggtgtacgacgacagcgatagacctagcggcatccccgagagattcagcggcagcaattccggcaataccgccacactgaccatcagcagagtggaagctggcgacgaggccgtgtactactgccaagtgtgggacagcagcagcgatcacgtggtgtttggcggcggaacaaagctgacagtgcttctcgaggacctgaagaacgtgttcccacctgaggtggccgtgttcgagcctagcgaggccgagatcagccacacccagaaagccaccctcgtgtgcctggctaccggcttctaccccgaccatgtggaactgtcttggtgggtcaacggcaaagaggtgcacagcggcgtgtgtaccgacccccagccactgaaagaacagcccgccctgaacgacagccggtactgcctgagcagcagactgagagtgtccgccaccttctggcagaacccccggaaccacttcagatgccaggtgcagttctacggcctgagcgagaacgacgagtggacccaggacagagccaagcccgtgacccagatcgtgtctgccgaagcctggggcagagccgattgcggctttaccagcgagagctaccagcagggcgtgctgagcgccaccatcctgtacgagatcctgctgggcaaggccaccctgtacgccgtgctggtgtctgccctggtgctgatggctatggtcaagcggaaggacagccggggaagggccaagcgatctggatctggagcaacaaacttctcactactcaaacaagcaggtgacgtggaggagaatcccgggcctactagtatggactggatttggcgcatccttttccttgtcggcgctgctaccggcgcgcattccttcgaacaactccagctgcaagagtctggccctggcctggtcaagcctagcgaaacactgagcctgacctgtaccgtgtctggcggctctatcagctccggcagctatttctggggctggatcagacaacctcctggcaaaggactggaatggatcggctccatctactacagcggcagcacctactacaaccccagcctgaagtccagagtgaccatctccgtggacaccagcaagaaccagttctccctgaagctgagcagcgtgacagccgccgataccgccgtgtattattgtgccagacatgacggcgctgtggccggcctgtttgattattggggacagggcaccctggtcaccgtgtcatctgctacgcgtatccagaaccctgatcctgccgtgtaccagctgcgggatagcaagagcagcgacaagagcgtgtgtctgttcaccgacttcgacagccagaccaacgtgtcccagagcaaggactccgacgtgtacatcaccgataagtgcgtgctggacatgcggagcatggacttcaagagcaactccgccgtggcctggtccaacaagtccgatttcgcctgcgccaacgccttcaacaacagcattatccccgaggacacattcttcccaagccccgagagcagctgcgacgtgaagctggtggaaaagagcttcgagacagacaccaacctgaacttccagaacctgagcgtgatcggcttcagaatcctgctgctgaaagtggccggctttaacctgctgatgaccctgcggctgtggtccagccgcgccaagagaagcggatctggcgtgaagcagaccctgaatttcgacctgctgaagctggctggcgacgtggaatccaacccaggcccttctagaggccatatgaccgagtacaagcccacggtgcgcctcgccacccgcgacgacgtccccagggccgtacgcaccctcgccgccgcgttcgccgactaccccgccacgcgccacaccgtcgatccggaccgccacatcgagcgggtcaccgagctgcaagaactcttcctcacgcgcgtcgggctcgacatcggcaaggtgtgggtcgcggacgacggcgccgcggtggcggtctggaccacgccggagagcgtcgaagcgggggcggtgttcgccgagatcggcccgcgcatggccgagttgagcggttcccggctggccgcgcagcaacagatggaaggcctcctggcgccgcaccggcccaaggagcccgcgtggttcctggccaccgtcggcgtctcgcccgaccaccagggcaagggtctgggcagcgccgtcgtgctccccggagtggaggcggccgagcgcgccggggtgcccgccttcctggagacctccgcgccccgcaacctccccttctacgagcggctcggcttcaccgtcaccgccgacgtcgaggtgcccgaaggaccgcgcacctggtgcatgacccgcaagcccggtgcctga

SEQ ID NO: 21869 - DNA, 2571 bp, Artificial Sequence
  Synthetic Polynucleotide
atggccttaccagtgaccgccttgctcctgccgctggccttgctgctccacgccgccaggccgagctacgtgctgacacagcctccatccgtgtctgtggctccaggacagaccgccagaatcacatgcggcggcaacaacatcggcagcaagagcgtgcactggtatcagcagccacctggacaggctccagtggtggtggtgtacgacgacagcgatagacctagcggcatccccgagagattcagcggcagcaattccggcaataccgccacactgaccatcagcagagtggaagctggcgacgaggccgtgtactactgccaagtgtgggacagcagcagcgatcacgtggtgtttggcggcggaacaaagctgacagtgcttctcgaggacctgaagaacgtgttcccacctgaggtggccgtgttcgagcctagcgaggccgagatcagccacacccagaaagccaccctcgtgtgcctggctaccggcttctaccccgaccatgtggaactgtcttggtgggtcaacggcaaagaggtgcacagcggcgtgtgtaccgacccccagccactgaaagaacagcccgccctgaacgacagccggtactgcctgagcagcagactgagagtgtccgccaccttctggcagaacccccggaaccacttcagatgccaggtgcagttctacggcctgagcgagaacgacgagtggacccaggacagagccaagcccgtgacccagatcgtgtctgccgaagcctggggcagagccgattgcggctttaccagcgagagctaccagcagggcgtgctgagcgccaccatcctgtacgagatcctgctgggcaaggccaccctgtacgccgtgctggtgtctgccctggtgctgatggctatggtcaagcggaaggacagccggggaagggccaagcgatctggatctggagcaacaaacttctcactactcaaacaagcaggtgacgtggaggagaatcccgggcctactagtatggactggatttggcgcatccttttccttgtcggcgctgctaccggcgcgcattccttcgaacaactccagctgcaagagtctggccctggcctggtcaagcctagcgaaacactgagcctgacctgtaccgtgtctggcggctctatcagctccggcagctatttctggggctggatcagacaacctcctggcaaaggactggaatggatcggctccatctactacagcggcatcagctactacaaccccagcctgaagtccagagtgaccatctccgtggacaccagcaagaaccagttctccctgaagctgagcagcgtgacagccgccgataccgccgtgtattattgtgccagacatgacggcgctgtggccggcctgtttgattattggggacagggcaccctggtcaccgtgtcatctgctacgcgtatccagaaccctgatcctgccgtgtaccagctgcgggatagcaagagcagcgacaagagcgtgtgtctgttcaccgacttcgacagccagaccaacgtgtcccagagcaaggactccgacgtgtacatcaccgataagtgcgtgctggacatgcggagcatggacttcaagagcaactccgccgtggcctggtccaacaagtccgatttcgcctgcgccaacgccttcaacaacagcattatccccgaggacacattcttcccaagccccgagagcagctgcgacgtgaagctggtggaaaagagcttcgagacagacaccaacctgaacttccagaacctgagcgtgatcggcttcagaatcctgctgctgaaagtggccggctttaacctgctgatgaccctgcggctgtggtccagccgcgccaagagaagcggatctggcgtgaagcagaccctgaatttcgacctgctgaagctggctggcgacgtggaatccaacccaggcccttctagaggccatatgaccgagtacaagcccacggtgcgcctcgccacccgcgacgacgtccccagggccgtacgcaccctcgccgccgcgttcgccgactaccccgccacgcgccacaccgtcgatccggaccgccacatcgagcgggtcaccgagctgcaagaactcttcctcacgcgcgtcgggctcgacatcggcaaggtgtgggtcgcggacgacggcgccgcggtggcggtctggaccacgccggagagcgtcgaagcgggggcggtgttcgccgagatcggcccgcgcatggccgagttgagcggttcccggctggccgcgcagcaacagatggaaggcctcctggcgccgcaccggcccaaggagcccgcgtggttcctggccaccgtcggcgtctcgcccgaccaccagggcaagggtctgggcagcgccgtcgtgctccccggagtggaggcggccgagcgcgccggggtgcccgccttcctggagacctccgcgccccgcaacctccccttctacgagcggctcggcttcaccgtcaccgccgacgtcgaggtgcccgaaggaccgcgcacctggtgcatgacccgcaagcccggtgcctga

SEQ ID NO: 21870 - DNA, 2571 bp, Artificial Sequence
  Synthetic Polynucleotide
atggccttaccagtgaccgccttgctcctgccgctggccttgctgctccacgccgccaggccgagctacgtgctgacacagcctccatccgtgtctgtggctccaggacagaccgccagaatcacatgcggcggcaacaacatcggcagcaagagcgtgcactggtatcagcagccacctggacaggctccagtggtggtggtgtacgacgacagcgatagacctagcggcatccccgagagattcagcggcagcaattccggcaataccgccacactgaccatcagcagagtggaagctggcgacgaggccgtgtactactgccaagtgtgggacagcagcagcgatcacgtggtgtttggcggcggaacaaagctgacagtgcttctcgaggacctgaagaacgtgttcccacctgaggtggccgtgttcgagcctagcgaggccgagatcagccacacccagaaagccaccctcgtgtgcctggctaccggcttctaccccgaccatgtggaactgtcttggtgggtcaacggcaaagaggtgcacagcggcgtgtgtaccgacccccagccactgaaagaacagcccgccctgaacgacagccggtactgcctgagcagcagactgagagtgtccgccaccttctggcagaacccccggaaccacttcagatgccaggtgcagttctacggcctgagcgagaacgacgagtggacccaggacagagccaagcccgtgacccagatcgtgtctgccgaagcctggggcagagccgattgcggctttaccagcgagagctaccagcagggcgtgctgagcgccaccatcctgtacgagatcctgctgggcaaggccaccctgtacgccgtgctggtgtctgccctggtgctgatggctatggtcaagcggaaggacagccggggaagggccaagcgatctggatctggagcaacaaacttctcactactcaaacaagcaggtgacgtggaggagaatcccgggcctactagtatggactggatttggcgcatccttttccttgtcggcgctgctaccggcgcgcattccttcgaacaactccagctgcaagagtctggccctggcctggtcaagcctagcgaaacactgagcctgacctgtaccgtgtctggcggctctatcagctccggcagctatttctggggctggatcagacaacctcctggcaaaggactggaatggatcggctccatctactacagcggcatcacctactacaaccccaccctgaagtccagagtgaccatctccgtggacaccagcaagaaccagttctccctgaagctgagcagcgtgacagccgccgataccgccgtgtattattgtgccagacatgacggcgctgtggccggcctgtttgattattggggacagggcaccctggtcaccgtgtcatctgctacgcgtatccagaaccctgatcctgccgtgtaccagctgcgggatagcaagagcagcgacaagagcgtgtgtctgttcaccgacttcgacagccagaccaacgtgtcccagagcaaggactccgacgtgtacatcaccgataagtgcgtgctggacatgcggagcatggacttcaagagcaactccgccgtggcctggtccaacaagtccgatttcgcctgcgccaacgccttcaacaacagcattatccccgaggacacattcttcccaagccccgagagcagctgcgacgtgaagctggtggaaaagagcttcgagacagacaccaacctgaacttccagaacctgagcgtgatcggcttcagaatcctgctgctgaaagtggccggctttaacctgctgatgaccctgcggctgtggtccagccgcgccaagagaagcggatctggcgtgaagcagaccctgaatttcgacctgctgaagctggctggcgacgtggaatccaacccaggcccttctagaggccatatgaccgagtacaagcccacggtgcgcctcgccacccgcgacgacgtccccagggccgtacgcaccctcgccgccgcgttcgccgactaccccgccacgcgccacaccgtcgatccggaccgccacatcgagcgggtcaccgagctgcaagaactcttcctcacgcgcgtcgggctcgacatcggcaaggtgtgggtcgcggacgacggcgccgcggtggcggtctggaccacgccggagagcgtcgaagcgggggcggtgttcgccgagatcggcccgcgcatggccgagttgagcggttcccggctggccgcgcagcaacagatggaaggcctcctggcgccgcaccggcccaaggagcccgcgtggttcctggccaccgtcggcgtctcgcccgaccaccagggcaagggtctgggcagcgccgtcgtgctccccggagtggaggcggccgagcgcgccggggtgcccgccttcctggagacctccgcgccccgcaacctccccttctacgagcggctcggcttcaccgtcaccgccgacgtcgaggtgcccgaaggaccgcgcacctggtgcatgacccgcaagcccggtgcctga

SEQ ID NO: 21871 - DNA, 2553 bp, Artificial Sequence
  Synthetic Polynucleotide
atggccttaccagtgaccgccttgctcctgccgctggccttgctgctccacgccgccaggccggacatccagatgacacagagccctagcagcctgtctgccagcgtgggagacagagtgaccatcacctgtagagccagccaggacatcagcaactacctgaactggtatcagcagaagcccggcaaggcccctaagctgctgatctactacaccagcagactgcacagcggcgtgcccagcagattttctggctctggcagcggcaccgacttcaccctgacaatatctagcctccagcctgaggacttcgccacctactattgccagcagggcaacaccctgccttacacatttggacagggcaccaaggtggaaatcaagagactcgaggacctgaagaacgtgttcccacctgaggtggccgtgttcgagcctagcgaggccgagatcagccacacccagaaagccaccctcgtgtgcctggctaccggcttctaccccgaccatgtggaactgtcttggtgggtcaacggcaaagaggtgcacagcggcgtgtgtaccgacccccagccactgaaagaacagcccgccctgaacgacagccggtactgcctgagcagcagactgagagtgtccgccaccttctggcagaacccccggaaccacttcagatgccaggtgcagttctacggcctgagcgagaacgacgagtggacccaggacagagccaagcccgtgacccagatcgtgtctgccgaagcctggggcagagccgattgcggctttaccagcgagagctaccagcagggcgtgctgagcgccaccatcctgtacgagatcctgctgggcaaggccaccctgtacgccgtgctggtgtctgccctggtgctgatggctatggtcaagcggaaggacagccggggaagggccaagcgatctggatctggagcaacaaacttctcactactcaaacaagcaggtgacgtggaggagaatcccgggcctactagtatggactggatttggcgcatccttttccttgtcggcgctgctaccggcgcgcattccttcgaagtgcagctggttgaatcaggtggcggcctggttcaacctggcggatctctgagactgagctgtgccgccagcggcttcaccttcagcgactactttatgagctgggtccgacaggcccctggcaaaggacttgaatgggtcgccaccatcagcaatggcggcacctacacttactaccccgacagcgtgaagggcagattcaccatctccagagacaacagcaagaacaccctgtacctccagatgaactccctgagagccgaggacaccgccgtgtactactgcgccagattcgacggctacatcttcgactattggggccagggcaccctggtcacagtctcttctacgcgtatccagaaccctgatcctgccgtgtaccagctgcgggatagcaagagcagcgacaagagcgtgtgtctgttcaccgacttcgacagccagaccaacgtgtcccagagcaaggactccgacgtgtacatcaccgataagtgcgtgctggacatgcggagcatggacttcaagagcaactccgccgtggcctggtccaacaagtccgatttcgcctgcgccaacgccttcaacaacagcattatccccgaggacacattcttcccaagccccgagagcagctgcgacgtgaagctggtggaaaagagcttcgagacagacaccaacctgaacttccagaacctgagcgtgatcggcttcagaatcctgctgctgaaagtggccggctttaacctgctgatgaccctgcggctgtggtccagccgcgccaagagaagcggatctggcgtgaagcagaccctgaatttcgacctgctgaagctggctggcgacgtggaatccaacccaggcccttctagaggccatatgaccgagtacaagcccacggtgcgcctcgccacccgcgacgacgtccccagggccgtacgcaccctcgccgccgcgttcgccgactaccccgccacgcgccacaccgtcgatccggaccgccacatcgagcgggtcaccgagctgcaagaactcttcctcacgcgcgtcgggctcgacatcggcaaggtgtgggtcgcggacgacggcgccgcggtggcggtctggaccacgccggagagcgtcgaagcgggggcggtgttcgccgagatcggcccgcgcatggccgagttgagcggttcccggctggccgcgcagcaacagatggaaggcctcctggcgccgcaccggcccaaggagcccgcgtggttcctggccaccgtcggcgtctcgcccgaccaccagggcaagggtctgggcagcgccgtcgtgctccccggagtggaggcggccgagcgcgccggggtgcccgccttcctggagacctccgcgccccgcaacctccccttctacgagcggctcggcttcaccgtcaccgccgacgtcgaggtgcccgaaggaccgcgcacctggtgcatgacccgcaagcccggtgcctga

SEQ ID NO: 21872 - DNA, 2553 bp, Artificial Sequence
  Synthetic Polynucleotide
atggccttaccagtgaccgccttgctcctgccgctggccttgctgctccacgccgccaggccggacatccagatgacacagagccctagcagcctgtctgccagcgtgggagacagagtgaccatcacctgtagagccagccaggacatcagcaactacctgaactggtatcagcagaagcccggcaaggcccctaagctgctgatctactacaccagcagactgcacagcggcgtgcccagcagattttctggctctggcagcggcaccgacttcaccctgacaatatctagcctccagcctgaggacttcgccacctactattgccagcagggcaacaccctgccttggacatttggacagggcaccaaggtggaaatcaagagactcgaggacctgaagaacgtgttcccacctgaggtggccgtgttcgagcctagcgaggccgagatcagccacacccagaaagccaccctcgtgtgcctggctaccggcttctaccccgaccatgtggaactgtcttggtgggtcaacggcaaagaggtgcacagcggcgtgtgtaccgacccccagccactgaaagaacagcccgccctgaacgacagccggtactgcctgagcagcagactgagagtgtccgccaccttctggcagaacccccggaaccacttcagatgccaggtgcagttctacggcctgagcgagaacgacgagtggacccaggacagagccaagcccgtgacccagatcgtgtctgccgaagcctggggcagagccgattgcggctttaccagcgagagctaccagcagggcgtgctgagcgccaccatcctgtacgagatcctgctgggcaaggccaccctgtacgccgtgctggtgtctgccctggtgctgatggctatggtcaagcggaaggacagccggggaagggccaagcgatctggatctggagcaacaaacttctcactactcaaacaagcaggtgacgtggaggagaatcccgggcctactagtatggactggatttggcgcatccttttccttgtcggcgctgctaccggcgcgcattccttcgaagtgcagctggttgaatcaggtggcggcctggttcaacctggcggatctctgagactgagctgtgccgccagcggctacaccttcagcgactactttatgagctgggtccgacaggcccctggcaaaggacttgaatgggtcgccaccatcagcaatggcggcacctacacttactaccccgacagcgtgaagggcagattcaccatctccagagacaacagcaagaacaccctgtacctccagatgaactccctgagagccgaggacaccgccgtgtactactgcgccagattcgacggctacatcttcgactattggggccagggcaccctggtcacagtctcttctacgcgtatccagaaccctgatcctgccgtgtaccagctgcgggatagcaagagcagcgacaagagcgtgtgtctgttcaccgacttcgacagccagaccaacgtgtcccagagcaaggactccgacgtgtacatcaccgataagtgcgtgctggacatgcggagcatggacttcaagagcaactccgccgtggcctggtccaacaagtccgatttcgcctgcgccaacgccttcaacaacagcattatccccgaggacacattcttcccaagccccgagagcagctgcgacgtgaagctggtggaaaagagcttcgagacagacaccaacctgaacttccagaacctgagcgtgatcggcttcagaatcctgctgctgaaagtggccggctttaacctgctgatgaccctgcggctgtggtccagccgcgccaagagaagcggatctggcgtgaagcagaccctgaatttcgacctgctgaagctggctggcgacgtggaatccaacccaggcccttctagaggccatatgaccgagtacaagcccacggtgcgcctcgccacccgcgacgacgtccccagggccgtacgcaccctcgccgccgcgttcgccgactaccccgccacgcgccacaccgtcgatccggaccgccacatcgagcgggtcaccgagctgcaagaactcttcctcacgcgcgtcgggctcgacatcggcaaggtgtgggtcgcggacgacggcgccgcggtggcggtctggaccacgccggagagcgtcgaagcgggggcggtgttcgccgagatcggcccgcgcatggccgagttgagcggttcccggctggccgcgcagcaacagatggaaggcctcctggcgccgcaccggcccaaggagcccgcgtggttcctggccaccgtcggcgtctcgcccgaccaccagggcaagggtctgggcagcgccgtcgtgctccccggagtggaggcggccgagcgcgccggggtgcccgccttcctggagacctccgcgccccgcaacctccccttctacgagcggctcggcttcaccgtcaccgccgacgtcgaggtgcccgaaggaccgcgcacctggtgcatgacccgcaagcccggtgcctga

SEQ ID NO: 21873 - DNA, 2553 bp, Artificial Sequence
  Synthetic Polynucleotide
atggccttaccagtgaccgccttgctcctgccgctggccttgctgctccacgccgccaggccggacatccagatgacacagagccctagcagcctgtctgccagcgtgggagacagagtgaccatcacctgtagagccagccaggacatcagcagctacctgaactggtatcagcagaagcccggcaaggcccctaagctgctgatctactacaccagcagactgcacagcggcgtgcccagcagattttctggctctggcagcggcaccgacttcaccctgacaatatctagcctccagcctgaggacttcgccacctactattgccagcagggcaacaccctgccttacacatttggacagggcaccaaggtggaaatcaagagactcgaggacctgaagaacgtgttcccacctgaggtggccgtgttcgagcctagcgaggccgagatcagccacacccagaaagccaccctcgtgtgcctggctaccggcttctaccccgaccatgtggaactgtcttggtgggtcaacggcaaagaggtgcacagcggcgtgtgtaccgacccccagccactgaaagaacagcccgccctgaacgacagccggtactgcctgagcagcagactgagagtgtccgccaccttctggcagaacccccggaaccacttcagatgccaggtgcagttctacggcctgagcgagaacgacgagtggacccaggacagagccaagcccgtgacccagatcgtgtctgccgaagcctggggcagagccgattgcggctttaccagcgagagctaccagcagggcgtgctgagcgccaccatcctgtacgagatcctgctgggcaaggccaccctgtacgccgtgctggtgtctgccctggtgctgatggctatggtcaagcggaaggacagccggggaagggccaagcgatctggatctggagcaacaaacttctcactactcaaacaagcaggtgacgtggaggagaatcccgggcctactagtatggactggatttggcgcatccttttccttgtcggcgctgctaccggcgcgcattccttcgaagtgcagctggttgaatcaggtggcggcctggttcaacctggcggatctctgagactgagctgtgccgccagcggctacaccttcagcgactactttatgagctgggtccgacaggcccctggcaaaggacttgaatgggtcgccaccatcagcaatggcggcacctacacttactaccccgacagcgtgaagggcagattcaccatctccagagacaacagcaagaacaccctgtacctccagatgaactccctgagagccgaggacaccgccgtgtactactgcgccagattcgacggctacatcttcgactattggggccagggcaccctggtcacagtctcttctacgcgtatccagaaccctgatcctgccgtgtaccagctgcgggatagcaagagcagcgacaagagcgtgtgtctgttcaccgacttcgacagccagaccaacgtgtcccagagcaaggactccgacgtgtacatcaccgataagtgcgtgctggacatgcggagcatggacttcaagagcaactccgccgtggcctggtccaacaagtccgatttcgcctgcgccaacgccttcaacaacagcattatccccgaggacacattcttcccaagccccgagagcagctgcgacgtgaagctggtggaaaagagcttcgagacagacaccaacctgaacttccagaacctgagcgtgatcggcttcagaatcctgctgctgaaagtggccggctttaacctgctgatgaccctgcggctgtggtccagccgcgccaagagaagcggatctggcgtgaagcagaccctgaatttcgacctgctgaagctggctggcgacgtggaatccaacccaggcccttctagaggccatatgaccgagtacaagcccacggtgcgcctcgccacccgcgacgacgtccccagggccgtacgcaccctcgccgccgcgttcgccgactaccccgccacgcgccacaccgtcgatccggaccgccacatcgagcgggtcaccgagctgcaagaactcttcctcacgcgcgtcgggctcgacatcggcaaggtgtgggtcgcggacgacggcgccgcggtggcggtctggaccacgccggagagcgtcgaagcgggggcggtgttcgccgagatcggcccgcgcatggccgagttgagcggttcccggctggccgcgcagcaacagatggaaggcctcctggcgccgcaccggcccaaggagcccgcgtggttcctggccaccgtcggcgtctcgcccgaccaccagggcaagggtctgggcagcgccgtcgtgctccccggagtggaggcggccgagcgcgccggggtgcccgccttcctggagacctccgcgccccgcaacctccccttctacgagcggctcggcttcaccgtcaccgccgacgtcgaggtgcccgaaggaccgcgcacctggtgcatgacccgcaagcccggtgcctga

SEQ ID NO: 21874 - DNA, 2553 bp, Artificial Sequence
  Synthetic Polynucleotide
atggccttaccagtgaccgccttgctcctgccgctggccttgctgctccacgccgccaggccggacatccagatgacacagagccctagcagcctgtctgccagcgtgggagacagagtgaccatcacctgtagagccagccaggacatcagcaactacctgaactggtatcagcagaagcccggcaaggcccctaagctgctgatctactacaccagcagactgcacagcggcgtgcccagcagattttctggctctggcagcggcaccgacttcaccctgacaatatctagcctccagcctgaggacttcgccacctactattgccagcagggcaacaccctgccttacacatttggacagggcaccaaggtggaaatcaagagactcgaggacctgaagaacgtgttcccacctgaggtggccgtgttcgagcctagcgaggccgagatcagccacacccagaaagccaccctcgtgtgcctggctaccggcttctaccccgaccatgtggaactgtcttggtgggtcaacggcaaagaggtgcacagcggcgtgtgtaccgacccccagccactgaaagaacagcccgccctgaacgacagccggtactgcctgagcagcagactgagagtgtccgccaccttctggcagaacccccggaaccacttcagatgccaggtgcagttctacggcctgagcgagaacgacgagtggacccaggacagagccaagcccgtgacccagatcgtgtctgccgaagcctggggcagagccgattgcggctttaccagcgagagctaccagcagggcgtgctgagcgccaccatcctgtacgagatcctgctgggcaaggccaccctgtacgccgtgctggtgtctgccctggtgctgatggctatggtcaagcggaaggacagccggggaagggccaagcgatctggatctggagcaacaaacttctcactactcaaacaagcaggtgacgtggaggagaatcccgggcctactagtatggactggatttggcgcatccttttccttgtcggcgctgctaccggcgcgcattccttcgaagtgcagctggttgaatcaggtggcggcctggttcaacctggcggatctctgagactgagctgtgccgccagcggctacaccttcagcgactactttatgagctgggtccgacaggcccctggcaaaggacttgaatgggtcgccaccatcagcaatggcggcacctacacttactaccccgacagcgtgaagggcagattcaccatctccagagacaacagcaagaacaccctgtacctccagatgaactccctgagagccgaggacaccgccgtgtactactgcgccagattcgacggctacatcttcgactattggggccagggcaccctggtcacagtctcttctacgcgtatccagaaccctgatcctgccgtgtaccagctgcgggatagcaagagcagcgacaagagcgtgtgtctgttcaccgacttcgacagccagaccaacgtgtcccagagcaaggactccgacgtgtacatcaccgataagtgcgtgctggacatgcggagcatggacttcaagagcaactccgccgtggcctggtccaacaagtccgatttcgcctgcgccaacgccttcaacaacagcattatccccgaggacacattcttcccaagccccgagagcagctgcgacgtgaagctggtggaaaagagcttcgagacagacaccaacctgaacttccagaacctgagcgtgatcggcttcagaatcctgctgctgaaagtggccggctttaacctgctgatgaccctgcggctgtggtccagccgcgccaagagaagcggatctggcgtgaagcagaccctgaatttcgacctgctgaagctggctggcgacgtggaatccaacccaggcccttctagaggccatatgaccgagtacaagcccacggtgcgcctcgccacccgcgacgacgtccccagggccgtacgcaccctcgccgccgcgttcgccgactaccccgccacgcgccacaccgtcgatccggaccgccacatcgagcgggtcaccgagctgcaagaactcttcctcacgcgcgtcgggctcgacatcggcaaggtgtgggtcgcggacgacggcgccgcggtggcggtctggaccacgccggagagcgtcgaagcgggggcggtgttcgccgagatcggcccgcgcatggccgagttgagcggttcccggctggccgcgcagcaacagatggaaggcctcctggcgccgcaccggcccaaggagcccgcgtggttcctggccaccgtcggcgtctcgcccgaccaccagggcaagggtctgggcagcgccgtcgtgctccccggagtggaggcggccgagcgcgccggggtgcccgccttcctggagacctccgcgccccgcaacctccccttctacgagcggctcggcttcaccgtcaccgccgacgtcgaggtgcccgaaggaccgcgcacctggtgcatgacccgcaagcccggtgcctga

SEQ ID NO: 21875 - DNA, 1854 bp, Artificial Sequence
  Synthetic Polynucleotide
atggccttaccagtgaccgccttgctcctgccgctggccttgctgctccacgccgccaggccggacatccagatgacacagagccctagcagcctgtctgccagcgtgggagacagagtgaccatcacctgtagagccagccaggacatcagcaactacctgaactggtatcagcagaagcccggcaaggcccctaagctgctgatctactacaccagcagactgcacagcggcgtgcccagcagattttctggctctggcagcggcaccgacttcaccctgacaatatctagcctccagcctgaggacttcgccacctactattgccagcagggcaacaccctgccttacacatttggacagggcaccaaggtggaaatcaagagactcgaggacctgaagaacgtgttcccacctgaggtggccgtgttcgagcctagcgaggccgagatcagccacacccagaaagccaccctcgtgtgcctggctaccggcttctaccccgaccatgtggaactgtcttggtgggtcaacggcaaagaggtgcacagcggcgtgtgtaccgacccccagccactgaaagaacagcccgccctgaacgacagccggtactgcctgagcagcagactgagagtgtccgccaccttctggcagaacccccggaaccacttcagatgccaggtgcagttctacggcctgagcgagaacgacgagtggacccaggacagagccaagcccgtgacccagatcgtgtctgccgaagcctggggcagagccgattgcggctttaccagcgagagctaccagcagggcgtgctgagcgccaccatcctgtacgagatcctgctgggcaaggccaccctgtacgccgtgctggtgtctgccctggtgctgatggctatggtcaagcggaaggacagccggggaagggccaagcgatctggatctggagcaacaaacttctcactactcaaacaagcaggtgacgtggaggagaatcccgggcctactagtatggactggatttggcgcatccttttccttgtcggcgctgctaccggcgcgcattccttcgaagtgcagctggttgaatcaggtggcggcctggttcaacctggcggatctctgagactgagctgtgccgccagcggctacaccttcagcgactactttatgagctgggtccgacaggcccctggcaaaggacttgaatgggtcgccaccatcagcaatggcggcacctacacttactaccccgacagcgtgaagggcagattcaccatctccagagacaacagcaagaacaccctgtacctccagatgaactccctgagagccgaggacaccgccgtgtactactgcgccagattcgacggctacatcttcgactattggggccagggcaccctggtcacagtctcttctacgcgtatccagaaccctgatcctgccgtgtaccagctgcgggatagcaagagcagcgacaagagcgtgtgtctgttcaccgacttcgacagccagaccaacgtgtcccagagcaaggactccgacgtgtacatcaccgataagtgcgtgctggacatgcggagcatggacttcaagagcaactccgccgtggcctggtccaacaagtccgatttcgcctgcgccaacgccttcaacaacagcattatccccgaggacacattcttcccaagccccgagagcagctgcgacgtgaagctggtggaaaagagcttcgagacagacaccaacctgaacttccagaacctgagcgtgatcggcttcagaatcctgctgctgaaagtggccggctttaacctgctgatgaccctgcggctgtggtccagctaa

SEQ ID NO: 21876 - DNA, 2553 bp, Artificial Sequence
  Synthetic Polynucleotide
atggccttaccagtgaccgccttgctcctgccgctggccttgctgctccacgccgccaggccggacatccagatgacacagagccctagcagcctgtctgccagcgtgggagacagagtgaccatcacctgtagagccagccaggacatcagcagctacctgaactggtatcagcagaagcccggcaaggcccctaagctgctgatctactacaccagcagactgcacagcggcgtgcccagcagattttctggctctggcagcggcaccgacttcaccctgacaatatctagcctccagcctgaggacttcgccacctactattgccagcagggcaacaccctgccttacacatttggacagggcaccaaggtggaaatcaagagactcgaggacctgaagaacgtgttcccacctgaggtggccgtgttcgagcctagcgaggccgagatcagccacacccagaaagccaccctcgtgtgcctggctaccggcttctaccccgaccatgtggaactgtcttggtgggtcaacggcaaagaggtgcacagcggcgtgtgtaccgacccccagccactgaaagaacagcccgccctgaacgacagccggtactgcctgagcagcagactgagagtgtccgccaccttctggcagaacccccggaaccacttcagatgccaggtgcagttctacggcctgagcgagaacgacgagtggacccaggacagagccaagcccgtgacccagatcgtgtctgccgaagcctggggcagagccgattgcggctttaccagcgagagctaccagcagggcgtgctgagcgccaccatcctgtacgagatcctgctgggcaaggccaccctgtacgccgtgctggtgtctgccctggtgctgatggctatggtcaagcggaaggacagccggggaagggccaagcgatctggatctggagcaacaaacttctcactactcaaacaagcaggtgacgtggaggagaatcccgggcctactagtatggactggatttggcgcatccttttccttgtcggcgctgctaccggcgcgcattccttcgaagtgcagctggttgaatcaggtggcggcctggttcaacctggcggatctctgagactgagctgtgccgccagcggcttcaccttcagcgactactttatgagctgggtccgacaggcccctggcaaaggacttgaatgggtcgccaccatcagcaatggcggcacctacacttactaccccgacagcgtgaagggcagattcaccatctccagagacaacagcaagaacaccctgtacctccagatgaactccctgagagccgaggacaccgccgtgtactactgcgccagattcgacggctacatcttcgactattggggccagggcaccctggtcacagtctcttctacgcgtatccagaaccctgatcctgccgtgtaccagctgcgggatagcaagagcagcgacaagagcgtgtgtctgttcaccgacttcgacagccagaccaacgtgtcccagagcaaggactccgacgtgtacatcaccgataagtgcgtgctggacatgcggagcatggacttcaagagcaactccgccgtggcctggtccaacaagtccgatttcgcctgcgccaacgccttcaacaacagcattatccccgaggacacattcttcccaagccccgagagcagctgcgacgtgaagctggtggaaaagagcttcgagacagacaccaacctgaacttccagaacctgagcgtgatcggcttcagaatcctgctgctgaaagtggccggctttaacctgctgatgaccctgcggctgtggtccagccgcgccaagagaagcggatctggcgtgaagcagaccctgaatttcgacctgctgaagctggctggcgacgtggaatccaacccaggcccttctagaggccatatgaccgagtacaagcccacggtgcgcctcgccacccgcgacgacgtccccagggccgtacgcaccctcgccgccgcgttcgccgactaccccgccacgcgccacaccgtcgatccggaccgccacatcgagcgggtcaccgagctgcaagaactcttcctcacgcgcgtcgggctcgacatcggcaaggtgtgggtcgcggacgacggcgccgcggtggcggtctggaccacgccggagagcgtcgaagcgggggcggtgttcgccgagatcggcccgcgcatggccgagttgagcggttcccggctggccgcgcagcaacagatggaaggcctcctggcgccgcaccggcccaaggagcccgcgtggttcctggccaccgtcggcgtctcgcccgaccaccagggcaagggtctgggcagcgccgtcgtgctccccggagtggaggcggccgagcgcgccggggtgcccgccttcctggagacctccgcgccccgcaacctccccttctacgagcggctcggcttcaccgtcaccgccgacgtcgaggtgcccgaaggaccgcgcacctggtgcatgacccgcaagcccggtgcctga

SEQ ID NO: 21877 - DNA, 2553 bp, Artificial Sequence
  Synthetic Polynucleotide
atggccttaccagtgaccgccttgctcctgccgctggccttgctgctccacgccgccaggccggacatccagatgacacagagccctagcagcctgtctgccagcgtgggagacagagtgaccatcacctgtagagccagccaggacatcagcaactacctgaactggtatcagcagaagcccggcaaggcccctaagctgctgatctactacaccagcagactgcacagcggcgtgcccagcagattttctggctctggcagcggcaccgacttcaccctgacaatatctagcctccagcctgaggacttcgccacctactattgccagcagggcaacaccctgccttggacatttggacagggcaccaaggtggaaatcaagagactcgaggacctgaagaacgtgttcccacctgaggtggccgtgttcgagcctagcgaggccgagatcagccacacccagaaagccaccctcgtgtgcctggctaccggcttctaccccgaccatgtggaactgtcttggtgggtcaacggcaaagaggtgcacagcggcgtgtgtaccgacccccagccactgaaagaacagcccgccctgaacgacagccggtactgcctgagcagcagactgagagtgtccgccaccttctggcagaacccccggaaccacttcagatgccaggtgcagttctacggcctgagcgagaacgacgagtggacccaggacagagccaagcccgtgacccagatcgtgtctgccgaagcctggggcagagccgattgcggctttaccagcgagagctaccagcagggcgtgctgagcgccaccatcctgtacgagatcctgctgggcaaggccaccctgtacgccgtgctggtgtctgccctggtgctgatggctatggtcaagcggaaggacagccggggaagggccaagcgatctggatctggagcaacaaacttctcactactcaaacaagcaggtgacgtggaggagaatcccgggcctactagtatggactggatttggcgcatccttttccttgtcggcgctgctaccggcgcgcattccttcgaagtgcagctggttgaatcaggtggcggcctggttcaacctggcggatctctgagactgagctgtgccgccagcggcttcaccttcagcgactactttatgagctgggtccgacaggcccctggcaaaggacttgaatgggtcgccaccatcagcaatggcggcacctacacttactaccccgacagcgtgaagggcagattcaccatctccagagacaacagcaagaacaccctgtacctccagatgaactccctgagagccgaggacaccgccgtgtactactgcgccagattcgacggctacatcttcgactattggggccagggcaccctggtcacagtctcttctacgcgtatccagaaccctgatcctgccgtgtaccagctgcgggatagcaagagcagcgacaagagcgtgtgtctgttcaccgacttcgacagccagaccaacgtgtcccagagcaaggactccgacgtgtacatcaccgataagtgcgtgctggacatgcggagcatggacttcaagagcaactccgccgtggcctggtccaacaagtccgatttcgcctgcgccaacgccttcaacaacagcattatccccgaggacacattcttcccaagccccgagagcagctgcgacgtgaagctggtggaaaagagcttcgagacagacaccaacctgaacttccagaacctgagcgtgatcggcttcagaatcctgctgctgaaagtggccggctttaacctgctgatgaccctgcggctgtggtccagccgcgccaagagaagcggatctggcgtgaagcagaccctgaatttcgacctgctgaagctggctggcgacgtggaatccaacccaggcccttctagaggccatatgaccgagtacaagcccacggtgcgcctcgccacccgcgacgacgtccccagggccgtacgcaccctcgccgccgcgttcgccgactaccccgccacgcgccacaccgtcgatccggaccgccacatcgagcgggtcaccgagctgcaagaactcttcctcacgcgcgtcgggctcgacatcggcaaggtgtgggtcgcggacgacggcgccgcggtggcggtctggaccacgccggagagcgtcgaagcgggggcggtgttcgccgagatcggcccgcgcatggccgagttgagcggttcccggctggccgcgcagcaacagatggaaggcctcctggcgccgcaccggcccaaggagcccgcgtggttcctggccaccgtcggcgtctcgcccgaccaccagggcaagggtctgggcagcgccgtcgtgctccccggagtggaggcggccgagcgcgccggggtgcccgccttcctggagacctccgcgccccgcaacctccccttctacgagcggctcggcttcaccgtcaccgccgacgtcgaggtgcccgaaggaccgcgcacctggtgcatgacccgcaagcccggtgcctga

SEQ ID NO: 21878 - DNA, 2553 bp, Artificial Sequence; identical to SEQ ID NO: 21876
  Synthetic Polynucleotide

SEQ ID NO: 21879 - DNA, 2553 bp, Artificial Sequence; identical to SEQ ID NO: 21877
  Synthetic Polynucleotide

SEQ ID NO: 21880 - DNA, 2565 bp, Artificial Sequence
  Synthetic Polynucleotide
atggccttaccagtgaccgccttgctcctgccgctggccttgctgctccacgccgccaggccggaggtgcagctggttgaatctggcggaggactggttcagcctggcggatctctgagactgtcttgtgccgccagcggctacaccttcaccacctattggatgcactgggtccgacaggcccctggcaaaggacttgagtgggtcggatatatcaggcccagcaccggctacacagagtacaaccagaagttcaaggaccgcttcaccatcagcgccgacaccagcaagaataccgcctacctccagatgaacagcctgagagccgaggacaccgccgtgtactactgtgccagatccagatggctgctggactattggggccagggcacactggttacagtttctctcgaggacctgaagaacgtgttcccacctgaggtggccgtgttcgagcctagcgaggccgagatcagccacacccagaaagccaccctcgtgtgcctggctaccggcttctaccccgaccatgtggaactgtcttggtgggtcaacggcaaagaggtgcacagcggcgtgtgtaccgacccccagccactgaaagaacagcccgccctgaacgacagccggtactgcctgagcagcagactgagagtgtccgccaccttctggcagaacccccggaaccacttcagatgccaggtgcagttctacggcctgagcgagaacgacgagtggacccaggacagagccaagcccgtgacccagatcgtgtctgccgaagcctggggcagagccgattgcggctttaccagcgagagctaccagcagggcgtgctgagcgccaccatcctgtacgagatcctgctgggcaaggccaccctgtacgccgtgctggtgtctgccctggtgctgatggctatggtcaagcggaaggacagccggggaagggccaagcgatctggatctggagcaacaaacttctcactactcaaacaagcaggtgacgtggaggagaatcccgggcctactagtatggactggatttggcgcatccttttccttgtcggcgctgctaccggcgcgcattccttcgaagacattcagatgacacagagccctagcagcctgagcgcctctgtgggagacagagtgaccatcacatgcaagagcagccagagcgtgctgtactccagcaatcagaagaactacctggcctggttccagcagaagcctggcaaggctcctaagctgctgatctactgggccagcaccagagaaagcggcgtgccaagcagattttctggcagcggctctggcaccgacttcaccctgacaatatccagcctccagcctgaggacttcgccacctacttttgccaccagtacctgagcagctacacattcggacagggcaccaaggtggaaatcaagcggacgcgtatccagaaccctgatcctgccgtgtaccagctgcgggatagcaagagcagcgacaagagcgtgtgtctgttcaccgacttcgacagccagaccaacgtgtcccagagcaaggactccgacgtgtacatcaccgataagtgcgtgctggacatgcggagcatggacttcaagagcaactccgccgtggcctggtccaacaagtccgatttcgcctgcgccaacgccttcaacaacagcattatccccgaggacacattcttcccaagccccgagagcagctgcgacgtgaagctggtggaaaagagcttcgagacagacaccaacctgaacttccagaacctgagcgtgatcggcttcagaatcctgctgctgaaagtggccggctttaacctgctgatgaccctgcggctgtggtccagccgcgccaagagaagcggatctggcgtgaagcagaccctgaatttcgacctgctgaagctggctggcgacgtggaatccaacccaggcccttctagaggccatatgaccgagtacaagcccacggtgcgcctcgccacccgcgacgacgtccccagggccgtacgcaccctcgccgccgcgttcgccgactaccccgccacgcgccacaccgtcgatccggaccgccacatcgagcgggtcaccgagctgcaagaactcttcctcacgcgcgtcgggctcgacatcggcaaggtgtgggtcgcggacgacggcgccgcggtggcggtctggaccacgccggagagcgtcgaagcgggggcggtgttcgccgagatcggcccgcgcatggccgagttgagcggttcccggctggccgcgcagcaacagatggaaggcctcctggcgccgcaccggcccaaggagcccgcgtggttcctggccaccgtcggcgtctcgcccgaccaccagggcaagggtctgggcagcgccgtcgtgctccccggagtggaggcggccgagcgcgccggggtgcccgccttcctggagacctccgcgccccgcaacctccccttctacgagcggctcggcttcaccgtcaccgccgacgtcgaggtgcccgaaggaccgcgcacctggtgcatgacccgcaagcccggtgcctga

SEQ ID NO: 21881 - skipped

SEQ ID NO: 21882 - DNA, 2553 bp, Artificial Sequence
  Synthetic Polynucleotide
atggccttaccagtgaccgccttgctcctgccgctggccttgctgctccacgccgccaggccggacatccagatgacacagagccctagcagcctgtctgccagcgtgggagacagagtgaccatcacatgcaaggccagccaggatgtgggcacagccgtggattggtatcagcagaagcctggcaaggcccctaagctgctgatctcttgggccagcacaagacacacaggcgtgcccagcagattttctggcagcggctctggcaccgacttcaccctgacaatatccagcctccagcctgaggacttcgccacctacttttgccagcagtacaacagctaccctctgaccttcggccagggcaccaaggtggaaatcaagagaacagttctcgaggacctgaagaacgtgttcccacctgaggtggccgtgttcgagcctagcgaggccgagatcagccacacccagaaagccaccctcgtgtgcctggctaccggcttctaccccgaccatgtggaactgtcttggtgggtcaacggcaaagaggtgcacagcggcgtgtgtaccgacccccagccactgaaagaacagcccgccctgaacgacagccggtactgcctgagcagcagactgagagtgtccgccaccttctggcagaacccccggaaccacttcagatgccaggtgcagttctacggcctgagcgagaacgacgagtggacccaggacagagccaagcccgtgacccagatcgtgtctgccgaagcctggggcagagccgattgcggctttaccagcgagagctaccagcagggcgtgctgagcgccaccatcctgtacgagatcctgctgggcaaggccaccctgtacgccgtgctggtgtctgccctggtgctgatggctatggtcaagcggaaggacagccggggaagggccaagcgatctggatctggagcaacaaacttctcactactcaaacaagcaggtgacgtggaggagaatcccgggcctactagtatggactggatttggcgcatccttttccttgtcggcgctgctaccggcgcgcattccttcgaagtgcagctggttgaatcaggtggcggcctggttcaacctggcggatctctgagactgagctgtgccgccagcggcttcacctttaccgactacacaatccactgggtccgacaggcccctggcaaaggacttgagtgggtcgccaacatcaaccccaacaatggcggcaccacctacaaccagaagttcgaggacagattcaccatcagccgggacaacagcaagaacaccctgtacctccagatgaactccctgagagccgaggacaccgccgtgtactattgtgccagaggctggaacttcgactactggggccagggaacactggtcaccgttagctctacgcgtatccagaaccctgatcctgccgtgtaccagctgcgggatagcaagagcagcgacaagagcgtgtgtctgttcaccgacttcgacagccagaccaacgtgtcccagagcaaggactccgacgtgtacatcaccgataagtgcgtgctggacatgcggagcatggacttcaagagcaactccgccgtggcctggtccaacaagtccgatttcgcctgcgccaacgccttcaacaacagcattatccccgaggacacattcttcccaagccccgagagcagctgcgacgtgaagctggtggaaaagagcttcgagacagacaccaacctgaacttccagaacctgagcgtgatcggcttcagaatcctgctgctgaaagtggccggctttaacctgctgatgaccctgcggctgtggtccagccgcgccaagagaagcggatctggcgtgaagcagaccctgaatttcgacctgctgaagctggctggcgacgtggaatccaacccaggcccttctagaggccatatgaccgagtacaagcccacggtgcgcctcgccacccgcgacgacgtccccagggccgtacgcaccctcgccgccgcgttcgccgactaccccgccacgcgccacaccgtcgatccggaccgccacatcgagcgggtcaccgagctgcaagaactcttcctcacgcgcgtcgggctcgacatcggcaaggtgtgggtcgcggacgacggcgccgcggtggcggtctggaccacgccggagagcgtcgaagcgggggcggtgttcgccgagatcggcccgcgcatggccgagttgagcggttcccggctggccgcgcagcaacagatggaaggcctcctggcgccgcaccggcccaaggagcccgcgtggttcctggccaccgtcggcgtctcgcccgaccaccagggcaagggtctgggcagcgccgtcgtgctccccggagtggaggcggccgagcgcgccggggtgcccgccttcctggagacctccgcgccccgcaacctccccttctacgagcggctcggcttcaccgtcaccgccgacgtcgaggtgcccgaaggaccgcgcacctggtgcatgacccgcaagcccggtgcctga

SEQ ID NO: 21883 - DNA, 2547 bp, Artificial Sequence
  Synthetic Polynucleotide
atggccttaccagtgaccgccttgctcctgccgctggccttgctgctccacgccgccaggccggacatccagatgacacagagccctagcagcctgtctgccagcgtgggagacagagtgaccatcacatgcaaggccagccaggatgtgggcacagccgtggattggtatcagcagaagcctggcaaggcccctaagctgctgatctactgggccagcacaagacacacaggcgtgcccagcagattttctggcagcggctctggcaccgacttcaccctgacaatatccagcctccagcctgaggacttcgccacctactactgccagcagtacaacagctaccctctgaccttcggccagggcaccaaggtggaaatcaaaagactcgaggacctgaagaacgtgttcccacctgaggtggccgtgttcgagcctagcgaggccgagatcagccacacccagaaagccaccctcgtgtgcctggctaccggcttctaccccgaccatgtggaactgtcttggtgggtcaacggcaaagaggtgcacagcggcgtgtgtaccgacccccagccactgaaagaacagcccgccctgaacgacagccggtactgcctgagcagcagactgagagtgtccgccaccttctggcagaacccccggaaccacttcagatgccaggtgcagttctacggcctgagcgagaacgacgagtggacccaggacagagccaagcccgtgacccagatcgtgtctgccgaagcctggggcagagccgattgcggctttaccagcgagagctaccagcagggcgtgctgagcgccaccatcctgtacgagatcctgctgggcaaggccaccctgtacgccgtgctggtgtctgccctggtgctgatggctatggtcaagcggaaggacagccggggaagggccaagcgatctggatctggagcaacaaacttctcactactcaaacaagcaggtgacgtggaggagaatcccgggcctactagtatggactggatttggcgcatccttttccttgtcggcgctgctaccggcgcgcattccttcgaagtgcagctggttgaatcaggtggcggcctggttcaacctggcggatctctgagactgagctgtgccgccagcggcttcacctttaccgactacacaatccactgggtccgacaggcccctggcaaaggacttgagtgggtcgccaacatcaaccccaacaatggcggcaccacctacaaccagaagttcgaggacagattcaccatcagccgggacaacagcaagaacaccctgtacctccagatgaactccctgagagccgaggacaccgccgtgtactattgtgccagaggctggaacttcgactactggggccagggaacactggtcaccgttagctctacgcgtatccagaaccctgatcctgccgtgtaccagctgcgggatagcaagagcagcgacaagagcgtgtgtctgttcaccgacttcgacagccagaccaacgtgtcccagagcaaggactccgacgtgtacatcaccgataagtgcgtgctggacatgcggagcatggacttcaagagcaactccgccgtggcctggtccaacaagtccgatttcgcctgcgccaacgccttcaacaacagcattatccccgaggacacattcttcccaagccccgagagcagctgcgacgtgaagctggtggaaaagagcttcgagacagacaccaacctgaacttccagaacctgagcgtgatcggcttcagaatcctgctgctgaaagtggccggctttaacctgctgatgaccctgcggctgtggtccagccgcgccaagagaagcggatctggcgtgaagcagaccctgaatttcgacctgctgaagctggctggcgacgtggaatccaacccaggcccttctagaggccatatgaccgagtacaagcccacggtgcgcctcgccacccgcgacgacgtccccagggccgtacgcaccctcgccgccgcgttcgccgactaccccgccacgcgccacaccgtcgatccggaccgccacatcgagcgggtcaccgagctgcaagaactcttcctcacgcgcgtcgggctcgacatcggcaaggtgtgggtcgcggacgacggcgccgcggtggcggtctggaccacgccggagagcgtcgaagcgggggcggtgttcgccgagatcggcccgcgcatggccgagttgagcggttcccggctggccgcgcagcaacagatggaaggcctcctggcgccgcaccggcccaaggagcccgcgtggttcctggccaccgtcggcgtctcgcccgaccaccagggcaagggtctgggcagcgccgtcgtgctccccggagtggaggcggccgagcgcgccggggtgcccgccttcctggagacctccgcgccccgcaacctccccttctacgagcggctcggcttcaccgtcaccgccgacgtcgaggtgcccgaaggaccgcgcacctggtgcatgacccgcaagcccggtgcctga

SEQ ID NO: 21884 - DNA, 2529 bp, Artificial Sequence
  Synthetic Polynucleotide
atggccttaccagtgaccgccttgctcctgccgctggccttgctgctccacgccgccaggccggacatccagatgacacagagccctagcagcctgtctgccagcgtgggagacagagtgaccatcacatgcaaggccagccaggatgtgggcacagccgtggattggtatcagcagaagcctggcaaggcccctaagctgctgatctactgggccagcacaagacacacaggcgtgcccagcagattttctggcagcggctctggcaccgacttcaccctgacaatatccagcctccagcctgaggacttcgccacctactactgccagcagtacaacagctaccctctgaccttcggccagggcaccaaggtggaaatcaaaagactcgagaccatcttcctgccctctatcgccgagacaaagctccagaaggccggcacctacctgtgcctgctggaaaagttcttcccagatgtgattaagatccactggcaggaaaagaagtccaacaccatcctgggcagccaggaaggcaacaccatgaagaccaacgacacctacatgaagttcagctggctgaccgtgcccgagaagtccctggacaaagaacacagatgcatcgtgcggcacgaaaacaacaagaacggcgtggaccaggaaatcatcttcccacccatcaagaccgatgtgattacaatggaccccaaggacaactgctccaaggacgccaacgataccctgctgctccagctgaccaacaccagcgcctactacatgtacttgttgctgctgctgaagtccgtggtgtacttcgccatcatcacatgctgcctgctgcggagaaccgccttctgctgcaacggcgagaagtctagggccaagcgatctggatctggagcaacaaacttctcactactcaaacaagcaggtgacgtggaggagaatcccgggcctactagtatggactggatttggcgcatccttttccttgtcggcgctgctaccggcgcgcattccttcgaagtgcagctggttgaatcaggtggcggcctggttcaacctggcggatctctgagactgagctgtgccgccagcggctacacctttaccgagtacacaatccactgggtccgacaggcccctggcaaaggacttgagtgggtcgccaacatcaaccccaacaatggcggcaccacctacaaccagaagttcgaggacagattcaccatcagccgggacaacagcaagaacaccctgtacctccagatgaactccctgagagccgaggacaccgccgtgtactattgtgccagaggctggaacttcgactactggggccagggaacactggtcaccgttagctctacgcgtcctcacaccaagcccagcgtgttcgtgatgaagaacggcaccaacgtggcctgcctcgtgaaagagttctaccccaaggacatcaggatcaacctggtgtccagcaagaagatcaccgagttcgaccccgccatcgtgatctcccccagcggcaagtacaacgccgtgaagctggggaagtacgaggacagcaacagcgtgacctgctccgtgcagcacgacaacaagaccgtgcacagcaccgactttgaagtgaaaaccgactccaccgaccacgtgaagcccaaagagacagagaacaccaagcagcccagcaagagctgccacaagcccaaggccatcgtgcacaccgagaaagtgaacatgatgagcctgaccgtgctgggcctgcggatgctgttcgccaaaaccgtggccgtgaacttcctgctgaccgccaagctgttcttcctccgcgccaagagaagcggatctggcgtgaagcagaccctgaatttcgacctgctgaagctggctggcgacgtggaatccaacccaggcccttctagaggccatatgaccgagtacaagcccacggtgcgcctcgccacccgcgacgacgtccccagggccgtacgcaccctcgccgccgcgttcgccgactaccccgccacgcgccacaccgtcgatccggaccgccacatcgagcgggtcaccgagctgcaagaactcttcctcacgcgcgtcgggctcgacatcggcaaggtgtgggtcgcggacgacggcgccgcggtggcggtctggaccacgccggagagcgtcgaagcgggggcggtgttcgccgagatcggcccgcgcatggccgagttgagcggttcccggctggccgcgcagcaacagatggaaggcctcctggcgccgcaccggcccaaggagcccgcgtggttcctggccaccgtcggcgtctcgcccgaccaccagggcaagggtctgggcagcgccgtcgtgctccccggagtggaggcggccgagcgcgccggggtgcccgccttcctggagacctccgcgccccgcaacctccccttctacgagcggctcggcttcaccgtcaccgccgacgtcgaggtgcccgaaggaccgcgcacctggtgcatgacccgcaagcccggtgcctga

SEQ ID NO: 21885 - DNA, 2544 bp, Artificial Sequence
  Synthetic Polynucleotide
atggccttaccagtgaccgccttgctcctgccgctggccttgctgctccacgccgccaggccggacatccagatgacacagagccctagcagcctgtctgccagcgtgggagacagagtgaccatcacatgcaaggccagccaggatgtgggcacagccgtggattggtatcagcagaagcctggcaaggcccctaagctgctgatctactgggccagcacaagacacacaggcgtgcccagcagattttctggcagcggctctggcaccgacttcaccctgacaatatccagcctccagcctgaggacttcgccacctactactgccagcagtacaacagctaccctctgaccttcggccagggcaccaaggtggaaatcaaaagactcgaggtgtcccccaagcctaccatcttcctgccctctatcgccgagacaaagctccagaaggccggcacctacctgtgcctgctggaaaagttcttcccagatgtgattaagatccactggcaggaaaagaagtccaacaccatcctgggcagccaggaaggcaacaccatgaagaccaacgacacctacatgaagttcagctggctgaccgtgcccgagaagtccctggacaaagaacacagatgcatcgtgcggcacgaaaacaacaagaacggcgtggaccaggaaatcatcttcccacccatcaagaccgatgtgattacaatggaccccaaggacaactgctccaaggacgccaacgataccctgctgctccagctgaccaacaccagcgcctactacatgtacttgttgctgctgctgaagtccgtggtgtacttcgccatcatcacatgctgcctgctgcggagaaccgccttctgctgcaacggcgagaagtctagggccaagcgatctggatctggagcaacaaacttctcactactcaaacaagcaggtgacgtggaggagaatcccgggcctactagtatggactggatttggcgcatccttttccttgtcggcgctgctaccggcgcgcattccttcgaagtgcagctggttgaatcaggtggcggcctggttcaacctggcggatctctgagactgagctgtgccgccagcggctacacctttaccgagtacacaatccactgggtccgacaggcccctggcaaaggacttgagtgggtcgccaacatcaaccccaacaatggcggcaccacctacaaccagaagttcgaggacagattcaccatcagccgggacaacagcaagaacaccctgtacctccagatgaactccctgagagccgaggacaccgccgtgtactattgtgccagaggctggaacttcgactactggggccagggaacactggtcaccgttagctctacgcgtcctcacaccaagcccagcgtgttcgtgatgaagaacggcaccaacgtggcctgcctcgtgaaagagttctaccccaaggacatcaggatcaacctggtgtccagcaagaagatcaccgagttcgaccccgccatcgtgatctcccccagcggcaagtacaacgccgtgaagctggggaagtacgaggacagcaacagcgtgacctgctccgtgcagcacgacaacaagaccgtgcacagcaccgactttgaagtgaaaaccgactccaccgaccacgtgaagcccaaagagacagagaacaccaagcagcccagcaagagctgccacaagcccaaggccatcgtgcacaccgagaaagtgaacatgatgagcctgaccgtgctgggcctgcggatgctgttcgccaaaaccgtggccgtgaacttcctgctgaccgccaagctgttcttcctccgcgccaagagaagcggatctggcgtgaagcagaccctgaatttcgacctgctgaagctggctggcgacgtggaatccaacccaggcccttctagaggccatatgaccgagtacaagcccacggtgcgcctcgccacccgcgacgacgtccccagggccgtacgcaccctcgccgccgcgttcgccgactaccccgccacgcgccacaccgtcgatccggaccgccacatcgagcgggtcaccgagctgcaagaactcttcctcacgcgcgtcgggctcgacatcggcaaggtgtgggtcgcggacgacggcgccgcggtggcggtctggaccacgccggagagcgtcgaagcgggggcggtgttcgccgagatcggcccgcgcatggccgagttgagcggttcccggctggccgcgcagcaacagatggaaggcctcctggcgccgcaccggcccaaggagcccgcgtggttcctggccaccgtcggcgtctcgcccgaccaccagggcaagggtctgggcagcgccgtcgtgctccccggagtggaggcggccgagcgcgccggggtgcccgccttcctggagacctccgcgccccgcaacctccccttctacgagcggctcggcttcaccgtcaccgccgacgtcgaggtgcccgaaggaccgcgcacctggtgcatgacccgcaagcccggtgcctga

SEQ ID NO: 21886 - DNA, 2445 bp, Artificial Sequence
  Synthetic Polynucleotide
atggccttaccagtgaccgccttgctcctgccgctggccttgctgctccacgccgccaggccggacatccagatgacacagagccctagcagcctgtctgccagcgtgggagacagagtgaccatcacatgcaaggccagccaggatgtgggcacagccgtggattggtatcagcagaagcctggcaaggcccctaagctgctgatctactgggccagcacaagacacacaggcgtgcccagcagattttctggcagcggctctggcaccgacttcaccctgacaatatccagcctccagcctgaggacttcgccacctactactgccagcagtacaacagctaccctctgaccttcggccagggcaccaaggtggaaatcaaaagactcgaggccgagatcagccacacccagaaagccaccctcgtgtgcctggctaccggcttctaccccgaccatgtggaactgtcttggtgggtcaacggcaaagaggtgcacagcggcgtgtgtaccgacccccagccactgaaagaacagcccgccctgaacgacagccggtactgcctgagcagcagactgagagtgtccgccaccttctggcagaacccccggaaccacttcagatgccaggtgcagttctacggcctgagcgagaacgacgagtggacccaggacagagccaagcccgtgacccagatcgtgtctgccgaagcctggggcagagccgattgcggctttaccagcgagagctaccagcagggcgtgctgagcgccaccatcctgtacgagatcctgctgggcaaggccaccctgtacgccgtgctggtgtctgccctggtgctgatggctatggtcaagcggaaggacagccggggaagggccaagcgatctggatctggagcaacaaacttctcactactcaaacaagcaggtgacgtggaggagaatcccgggcctactagtatggactggatttggcgcatccttttccttgtcggcgctgctaccggcgcgcattccttcgaagtgcagctggttgaatcaggtggcggcctggttcaacctggcggatctctgagactgagctgtgccgccagcggctacacctttaccgagtacacaatccactgggtccgacaggcccctggcaaaggacttgagtgggtcgccaacatcaaccccaacaatggcggcaccacctacaaccagaagttcgaggacagattcaccatcagccgggacaacagcaagaacaccctgtacctccagatgaactccctgagagccgaggacaccgccgtgtactattgtgccagaggctggaacttcgactactggggccagggaacactggtcaccgttagctctacgcgtgacaagagcgtgtgtctgttcaccgacttcgacagccagaccaacgtgtcccagagcaaggactccgacgtgtacatcaccgataagtgcgtgctggacatgcggagcatggacttcaagagcaactccgccgtggcctggtccaacaagtccgatttcgcctgcgccaacgccttcaacaacagcattatccccgaggacacattcttcccaagccccgagagcagctgcgacgtgaagctggtggaaaagagcttcgagacagacaccaacctgaacttccagaacctgagcgtgatcggcttcagaatcctgctgctgaaagtggccggctttaacctgctgatgaccctgcggctgtggtccagccgcgccaagagaagcggatctggcgtgaagcagaccctgaatttcgacctgctgaagctggctggcgacgtggaatccaacccaggcccttctagaggccatatgaccgagtacaagcccacggtgcgcctcgccacccgcgacgacgtccccagggccgtacgcaccctcgccgccgcgttcgccgactaccccgccacgcgccacaccgtcgatccggaccgccacatcgagcgggtcaccgagctgcaagaactcttcctcacgcgcgtcgggctcgacatcggcaaggtgtgggtcgcggacgacggcgccgcggtggcggtctggaccacgccggagagcgtcgaagcgggggcggtgttcgccgagatcggcccgcgcatggccgagttgagcggttcccggctggccgcgcagcaacagatggaaggcctcctggcgccgcaccggcccaaggagcccgcgtggttcctggccaccgtcggcgtctcgcccgaccaccagggcaagggtctgggcagcgccgtcgtgctccccggagtggaggcggccgagcgcgccggggtgcccgccttcctggagacctccgcgccccgcaacctccccttctacgagcggctcggcttcaccgtcaccgccgacgtcgaggtgcccgaaggaccgcgcacctggtgcatgacccgcaagcccggtgcctga

SEQ ID NO: 21887 - DNA, 2454 bp, Artificial Sequence
  Synthetic Polynucleotide
atggccttaccagtgaccgccttgctcctgccgctggccttgctgctccacgccgccaggccggacatccagatgacacagagccctagcagcctgtctgccagcgtgggagacagagtgaccatcacatgcaaggccagccaggatgtgggcacagccgtggattggtatcagcagaagcctggcaaggcccctaagctgctgatctactgggccagcacaagacacacaggcgtgcccagcagattttctggcagcggctctggcaccgacttcaccctgacaatatccagcctccagcctgaggacttcgccacctactactgccagcagtacaacagctaccctctgaccttcggccagggcaccaaggtggaaatcaaaagactcgagcctagcgaggccgagatcagccacacccagaaagccaccctcgtgtgcctggctaccggcttctaccccgaccatgtggaactgtcttggtgggtcaacggcaaagaggtgcacagcggcgtgtgtaccgacccccagccactgaaagaacagcccgccctgaacgacagccggtactgcctgagcagcagactgagagtgtccgccaccttctggcagaacccccggaaccacttcagatgccaggtgcagttctacggcctgagcgagaacgacgagtggacccaggacagagccaagcccgtgacccagatcgtgtctgccgaagcctggggcagagccgattgcggctttaccagcgagagctaccagcagggcgtgctgagcgccaccatcctgtacgagatcctgctgggcaaggccaccctgtacgccgtgctggtgtctgccctggtgctgatggctatggtcaagcggaaggacagccggggaagggccaagcgatctggatctggagcaacaaacttctcactactcaaacaagcaggtgacgtggaggagaatcccgggcctactagtatggactggatttggcgcatccttttccttgtcggcgctgctaccggcgcgcattccttcgaagtgcagctggttgaatcaggtggcggcctggttcaacctggcggatctctgagactgagctgtgccgccagcggctacacctttaccgagtacacaatccactgggtccgacaggcccctggcaaaggacttgagtgggtcgccaacatcaaccccaacaatggcggcaccacctacaaccagaagttcgaggacagattcaccatcagccgggacaacagcaagaacaccctgtacctccagatgaactccctgagagccgaggacaccgccgtgtactattgtgccagaggctggaacttcgactactggggccagggaacactggtcaccgttagctctacgcgtgacaagagcgtgtgtctgttcaccgacttcgacagccagaccaacgtgtcccagagcaaggactccgacgtgtacatcaccgataagtgcgtgctggacatgcggagcatggacttcaagagcaactccgccgtggcctggtccaacaagtccgatttcgcctgcgccaacgccttcaacaacagcattatccccgaggacacattcttcccaagccccgagagcagctgcgacgtgaagctggtggaaaagagcttcgagacagacaccaacctgaacttccagaacctgagcgtgatcggcttcagaatcctgctgctgaaagtggccggctttaacctgctgatgaccctgcggctgtggtccagccgcgccaagagaagcggatctggcgtgaagcagaccctgaatttcgacctgctgaagctggctggcgacgtggaatccaacccaggcccttctagaggccatatgaccgagtacaagcccacggtgcgcctcgccacccgcgacgacgtccccagggccgtacgcaccctcgccgccgcgttcgccgactaccccgccacgcgccacaccgtcgatccggaccgccacatcgagcgggtcaccgagctgcaagaactcttcctcacgcgcgtcgggctcgacatcggcaaggtgtgggtcgcggacgacggcgccgcggtggcggtctggaccacgccggagagcgtcgaagcgggggcggtgttcgccgagatcggcccgcgcatggccgagttgagcggttcccggctggccgcgcagcaacagatggaaggcctcctggcgccgcaccggcccaaggagcccgcgtggttcctggccaccgtcggcgtctcgcccgaccaccagggcaagggtctgggcagcgccgtcgtgctccccggagtggaggcggccgagcgcgccggggtgcccgccttcctggagacctccgcgccccgcaacctccccttctacgagcggctcggcttcaccgtcaccgccgacgtcgaggtgcccgaaggaccgcgcacctggtgcatgacccgcaagcccggtgcctga

SEQ ID NO: 21888 - DNA, 2547 bp, Artificial Sequence
  Synthetic Polynucleotide
atggccttaccagtgaccgccttgctcctgccgctggccttgctgctccacgccgccaggccggacatccagatgacacagagccctagcagcctgtctgccagcgtgggagacagagtgaccatcacatgcaaggccagccaggatgtgggcacagccgtggattggtatcagcagaagcctggcaaggcccctaagctgctgatctactgggccagcacaagacacacaggcgtgcccagcagattttctggcagcggctctggcaccgacttcaccctgacaatatccagcctccagcctgaggacttcgccacctactactgccagcaggccaacagctaccctctgaccttcggccagggcaccaaggtggaaatcaaaagactcgaggacctgaagaacgtgttcccacctgaggtggccgtgttcgagcctagcgaggccgagatcagccacacccagaaagccaccctcgtgtgcctggctaccggcttctaccccgaccatgtggaactgtcttggtgggtcaacggcaaagaggtgcacagcggcgtgtgtaccgacccccagccactgaaagaacagcccgccctgaacgacagccggtactgcctgagcagcagactgagagtgtccgccaccttctggcagaacccccggaaccacttcagatgccaggtgcagttctacggcctgagcgagaacgacgagtggacccaggacagagccaagcccgtgacccagatcgtgtctgccgaagcctggggcagagccgattgcggctttaccagcgagagctaccagcagggcgtgctgagcgccaccatcctgtacgagatcctgctgggcaaggccaccctgtacgccgtgctggtgtctgccctggtgctgatggctatggtcaagcggaaggacagccggggaagggccaagcgatctggatctggagcaacaaacttctcactactcaaacaagcaggtgacgtggaggagaatcccgggcctactagtatggactggatttggcgcatccttttccttgtcggcgctgctaccggcgcgcattccttcgaagtgcagctggttgaatcaggtggcggcctggttcaacctggcggatctctgagactgagctgtgccgccagcggcttcacctttaccgactacacaatccactgggtccgacaggcccctggcaaaggacttgagtgggtcgccaacatcaaccccaacaatggcggcaccacctacaaccagaagttcgaggacagattcaccatcagccgggacaacagcaagaacaccctgtacctccagatgaactccctgagagccgaggacaccgccgtgtactattgtgccagaggctggaacttcgactactggggccagggaacactggtcaccgttagctctacgcgtatccagaaccctgatcctgccgtgtaccagctgcgggatagcaagagcagcgacaagagcgtgtgtctgttcaccgacttcgacagccagaccaacgtgtcccagagcaaggactccgacgtgtacatcaccgataagtgcgtgctggacatgcggagcatggacttcaagagcaactccgccgtggcctggtccaacaagtccgatttcgcctgcgccaacgccttcaacaacagcattatccccgaggacacattcttcccaagccccgagagcagctgcgacgtgaagctggtggaaaagagcttcgagacagacaccaacctgaacttccagaacctgagcgtgatcggcttcagaatcctgctgctgaaagtggccggctttaacctgctgatgaccctgcggctgtggtccagccgcgccaagagaagcggatctggcgtgaagcagaccctgaatttcgacctgctgaagctggctggcgacgtggaatccaacccaggcccttctagaggccatatgaccgagtacaagcccacggtgcgcctcgccacccgcgacgacgtccccagggccgtacgcaccctcgccgccgcgttcgccgactaccccgccacgcgccacaccgtcgatccggaccgccacatcgagcgggtcaccgagctgcaagaactcttcctcacgcgcgtcgggctcgacatcggcaaggtgtgggtcgcggacgacggcgccgcggtggcggtctggaccacgccggagagcgtcgaagcgggggcggtgttcgccgagatcggcccgcgcatggccgagttgagcggttcccggctggccgcgcagcaacagatggaaggcctcctggcgccgcaccggcccaaggagcccgcgtggttcctggccaccgtcggcgtctcgcccgaccaccagggcaagggtctgggcagcgccgtcgtgctccccggagtggaggcggccgagcgcgccggggtgcccgccttcctggagacctccgcgccccgcaacctccccttctacgagcggctcggcttcaccgtcaccgccgacgtcgaggtgcccgaaggaccgcgcacctggtgcatgacccgcaagcccggtgcctga

SEQ ID NO: 21889 - DNA, 2682 bp, Artificial Sequence
  Synthetic Polynucleotide
atggccttaccagtgaccgccttgctcctgccgctggccttgctgctccacgccgccaggccggcatgcccctacatcaacatctacaacgccgagcctgccaatcctagcgagaagaacagccccacacagtacgcctacggtaccggcggaggcggatctggcggcggaggtagcggtggcggaggatctgaattcgacatccagatgacacagagccctagcagcctgtctgccagcgtgggagacagagtgaccatcacatgcaaggccagccaggatgtgggcacagccgtggattggtatcagcagaagcctggcaaggcccctaagctgctgatctactgggccagcacaagacacacaggcgtgcccagcagattttctggcagcggctctggcaccgacttcaccctgacaatatccagcctccagcctgaggacttcgccacctactactgccagcagtacaacagctaccctctgaccttcggccagggcaccaaggtggaaatcaaaagactcgaggacctgaagaacgtgttcccacctgaggtggccgtgttcgagcctagcgaggccgagatcagccacacccagaaagccaccctcgtgtgcctggctaccggcttctaccccgaccatgtggaactgtcttggtgggtcaacggcaaagaggtgcacagcggcgtgtgtaccgacccccagccactgaaagaacagcccgccctgaacgacagccggtactgcctgagcagcagactgagagtgtccgccaccttctggcagaacccccggaaccacttcagatgccaggtgcagttctacggcctgagcgagaacgacgagtggacccaggacagagccaagcccgtgacccagatcgtgtctgccgaagcctggggcagagccgattgcggctttaccagcgagagctaccagcagggcgtgctgagcgccaccatcctgtacgagatcctgctgggcaaggccaccctgtacgccgtgctggtgtctgccctggtgctgatggctatggtcaagcggaaggacagccggggaagggccaagcgatctggatctggagcaacaaacttctcactactcaaacaagcaggtgacgtggaggagaatcccgggcctactagtatggactggatttggcgcatccttttccttgtcggcgctgctaccggcgcgcattccttcgaagtgcagctggttgaatcaggtggcggcctggttcaacctggcggatctctgagactgagctgtgccgccagcggcttcacctttaccgactacacaatccactgggtccgacaggcccctggcaaaggacttgagtgggtcgccaacatcaaccccaacaatggcggcaccacctacaaccagaagttcgaggacagattcaccatcagccgggacaacagcaagaacaccctgtacctccagatgaactccctgagagccgaggacaccgccgtgtactattgtgccagaggctggaacttcgactactggggccagggaacactggtcaccgttagctctacgcgtatccagaaccctgatcctgccgtgtaccagctgcgggatagcaagagcagcgacaagagcgtgtgtctgttcaccgacttcgacagccagaccaacgtgtcccagagcaaggactccgacgtgtacatcaccgataagtgcgtgctggacatgcggagcatggacttcaagagcaactccgccgtggcctggtccaacaagtccgatttcgcctgcgccaacgccttcaacaacagcattatccccgaggacacattcttcccaagccccgagagcagctgcgacgtgaagctggtggaaaagagcttcgagacagacaccaacctgaacttccagaacctgagcgtgatcggcttcagaatcctgctgctgaaagtggccggctttaacctgctgatgaccctgcggctgtggtccagccgcgccaagagaagcggatctggcgtgaagcagaccctgaatttcgacctgctgaagctggctggcgacgtggaatccaacccaggcccttctagaggccatatgaccgagtacaagcccacggtgcgcctcgccacccgcgacgacgtccccagggccgtacgcaccctcgccgccgcgttcgccgactaccccgccacgcgccacaccgtcgatccggaccgccacatcgagcgggtcaccgagctgcaagaactcttcctcacgcgcgtcgggctcgacatcggcaaggtgtgggtcgcggacgacggcgccgcggtggcggtctggaccacgccggagagcgtcgaagcgggggcggtgttcgccgagatcggcccgcgcatggccgagttgagcggttcccggctggccgcgcagcaacagatggaaggcctcctggcgccgcaccggcccaaggagcccgcgtggttcctggccaccgtcggcgtctcgcccgaccaccagggcaagggtctgggcagcgccgtcgtgctccccggagtggaggcggccgagcgcgccggggtgcccgccttcctggagacctccgcgccccgcaacctccccttctacgagcggctcggcttcaccgtcaccgccgacgtcgaggtgcccgaaggaccgcgcacctggtgcatgacccgcaagcccggtgcctga

SEQ ID NO: 21890 - DNA, 2682 bp, Artificial Sequence; identical to SEQ ID NO: 21889
  Synthetic Polynucleotide

SEQ ID NO: 21891 - DNA, 2850 bp, Artificial Sequence
  Synthetic Polynucleotide
atggccttaccagtgaccgccttgctcctgccgctggccttgctgctccacgccgccaggccgtacatcaacatctacaacgccgagcctgccaatcctagcgagaagaacagccccagcacacagtacgcctatggcggcggaagctatatcaatatctataatgccgaaccggctaacccctccgaaaagaactcccctagcactcagtatgcttacagcggaggttctgcatgcccctacatcaacatctacaacgccgagcctgccaatcctagcgagaagaacagccccacacagtacgcctacggtaccggcggaggcggatctggcggcggaggtagcggtggcggaggatctgaattcgacatccagatgacacagagccctagcagcctgtctgccagcgtgggagacagagtgaccatcacatgcaaggccagccaggatgtgggcacagccgtggattggtatcagcagaagcctggcaaggcccctaagctgctgatctactgggccagcacaagacacacaggcgtgcccagcagattttctggcagcggctctggcaccgacttcaccctgacaatatccagcctccagcctgaggacttcgccacctactactgccagcagtacaacagctaccctctgaccttcggccagggcaccaaggtggaaatcaaaagactcgaggacctgaagaacgtgttcccacctgaggtggccgtgttcgagcctagcgaggccgagatcagccacacccagaaagccaccctcgtgtgcctggctaccggcttctaccccgaccatgtggaactgtcttggtgggtcaacggcaaagaggtgcacagcggcgtgtgtaccgacccccagccactgaaagaacagcccgccctgaacgacagccggtactgcctgagcagcagactgagagtgtccgccaccttctggcagaacccccggaaccacttcagatgccaggtgcagttctacggcctgagcgagaacgacgagtggacccaggacagagccaagcccgtgacccagatcgtgtctgccgaagcctggggcagagccgattgcggctttaccagcgagagctaccagcagggcgtgctgagcgccaccatcctgtacgagatcctgctgggcaaggccaccctgtacgccgtgctggtgtctgccctggtgctgatggctatggtcaagcggaaggacagccggggaagggccaagcgatctggatctggagcaacaaacttctcactactcaaacaagcaggtgacgtggaggagaatcccgggcctactagtatggactggatttggcgcatccttttccttgtcggcgctgctaccggcgcgcattccttcgaagtgcagctggttgaatcaggtggcggcctggttcaacctggcggatctctgagactgagctgtgccgccagcggctacacctttaccgagtacacaatccactgggtccgacaggcccctggcaaaggacttgagtgggtcgccaacatcaaccccaacaatggcggcaccacctacaaccagaagttcgaggacagattcaccatcagccgggacaacagcaagaacaccctgtacctccagatgaactccctgagagccgaggacaccgccgtgtactattgtgccagaggctggaacttcgactactggggccagggaacactggtcaccgttagctctacgcgtatccagaaccctgatcctgccgtgtaccagctgcgggatagcaagagcagcgacaagagcgtgtgtctgttcaccgacttcgacagccagaccaacgtgtcccagagcaaggactccgacgtgtacatcaccgataagtgcgtgctggacatgcggagcatggacttcaagagcaactccgccgtggcctggtccaacaagtccgatttcgcctgcgccaacgccttcaacaacagcattatccccgaggacacattcttcccaagccccgagagcagctgcgacgtgaagctggtggaaaagagcttcgagacagacaccaacctgaacttccagaacctgagcgtgatcggcttcagaatcctgctgctgaaagtggccggctttaacctgctgatgaccctgcggctgtggtccagccgcgccaagagaagcggatctggcgtgaagcagaccctgaatttcgacctgctgaagctggctggcgacgtggaatccaacccaggcccttctagaggccatatgaccgagtacaagcccacggtgcgcctcgccacccgcgacgacgtccccagggccgtacgcaccctcgccgccgcgttcgccgactaccccgccacgcgccacaccgtcgatccggaccgccacatcgagcgggtcaccgagctgcaagaactcttcctcacgcgcgtcgggctcgacatcggcaaggtgtgggtcgcggacgacggcgccgcggtggcggtctggaccacgccggagagcgtcgaagcgggggcggtgttcgccgagatcggcccgcgcatggccgagttgagcggttcccggctggccgcgcagcaacagatggaaggcctcctggcgccgcaccggcccaaggagcccgcgtggttcctggccaccgtcggcgtctcgcccgaccaccagggcaagggtctgggcagcgccgtcgtgctccccggagtggaggcggccgagcgcgccggggtgcccgccttcctggagacctccgcgccccgcaacctccccttctacgagcggctcggcttcaccgtcaccgccgacgtcgaggtgcccgaaggaccgcgcacctggtgcatgacccgcaagcccggtgcctga

SEQ ID NO: 21892 - DNA, 2547 bp, Artificial Sequence
  Synthetic Polynucleotide
atggccttaccagtgaccgccttgctcctgccgctggccttgctgctccacgccgccaggccggacatccagatgacacagagccctagcagcctgtctgccagcgtgggagacagagtgaccatcacatgcaaggccagccaggatgtgggcacagccgtggattggtatcagcagaagcctggcaaggcccctaagctgctgatctactgggccagcacaagacacacaggcgtgcccagcagattttctggcagcggctctggcaccgacttcaccctgacaatatccagcctccagcctgaggacttcgccacctactactgccagcagtacaacagctaccctctgaccttcggccagggcaccaaggtggaaatcaaaagactcgaggacctgaagaacgtgttcccacctgaggtggccgtgttcgagcctagcgaggccgagatcagccacacccagaaagccaccctcgtgtgcctggctaccggcttctaccccgaccatgtggaactgtcttggtgggtcaacggcaaagaggtgcacagcggcgtgtgtaccgacccccagccactgaaagaacagcccgccctgaacgacagccggtactgcctgagcagcagactgagagtgtccgccaccttctggcagaacccccggaaccacttcagatgccaggtgcagttctacggcctgagcgagaacgacgagtggacccaggacagagccaagcccgtgacccagatcgtgtctgccgaagcctggggcagagccgattgcggctttaccagcgagagctaccagcagggcgtgctgagcgccaccatcctgtacgagatcctgctgggcaaggccaccctgtacgccgtgctggtgtctgccctggtgctgatggctatggtcaagcggaaggacagccggggaagggccaagcgatctggatctggagcaacaaacttctcactactcaaacaagcaggtgacgtggaggagaatcccgggcctactagtatggactggatttggcgcatccttttccttgtcggcgctgctaccggcgcgcattccttcgaagtgcagctggttgaatcaggtggcggcctggttcaacctggcggatctctgagactgagctgtgccgccagcggctacacctttaccgagtacacaatccactgggtccgacaggcccctggcaaaggacttgagtgggtcgccaacatcaaccccaacaatggcggcaccacctacaaccagaagttcgaggacagattcaccatcagccgggacaacagcaagaacaccctgtacctccagatgaactccctgagagccgaggacaccgccgtgtactattgtgccagaggctggaacttcgactactggggccagggaacactggtcaccgttagctctacgcgtatccagaaccctgatcctgccgtgtaccagctgcgggatagcaagagcagcgacaagagcgtgtgtctgttcaccgacttcgacagccagaccaacgtgtcccagagcaaggactccgacgtgtacatcaccgataagtgcgtgctggacatgcggagcatggacttcaagagcaactccgccgtggcctggtccaacaagtccgatttcgcctgcgccaacgccttcaacaacagcattatccccgaggacacattcttcccaagccccgagagcagctgcgacgtgaagctggtggaaaagagcttcgagacagacaccaacctgaacttccagaacctgagcgtgatcggcttcagaatcctgctgctgaaagtggccggctttaacctgctgatgaccctgcggctgtggtccagccgcgccaagagaagcggatctggcgtgaagcagaccctgaatttcgacctgctgaagctggctggcgacgtggaatccaacccaggcccttctagaggccatatgaccgagtacaagcccacggtgcgcctcgccacccgcgacgacgtccccagggccgtacgcaccctcgccgccgcgttcgccgactaccccgccacgcgccacaccgtcgatccggaccgccacatcgagcgggtcaccgagctgcaagaactcttcctcacgcgcgtcgggctcgacatcggcaaggtgtgggtcgcggacgacggcgccgcggtggcggtctggaccacgccggagagcgtcgaagcgggggcggtgttcgccgagatcggcccgcgcatggccgagttgagcggttcccggctggccgcgcagcaacagatggaaggcctcctggcgccgcaccggcccaaggagcccgcgtggttcctggccaccgtcggcgtctcgcccgaccaccagggcaagggtctgggcagcgccgtcgtgctccccggagtggaggcggccgagcgcgccggggtgcccgccttcctggagacctccgcgccccgcaacctccccttctacgagcggctcggcttcaccgtcaccgccgacgtcgaggtgcccgaaggaccgcgcacctggtgcatgacccgcaagcccggtgcctga

SEQ ID NO: 21893 - DNA, 27 bp, Artificial Sequence
  Synthetic Polynucleotide
ggggggggggggggggggggggggggg

SEQ ID NO: 21894 - DNA, 1884 bp, Artificial Sequence
  Synthetic Polynucleotide
atggccttaccagtgaccgccttgctcctgccgctggccttgctgctccacgccgccaggccggacatccagatgacacagagccctagcagcctgtctgccagcgtgggagacagagtgaccatcacctgtagagccagccaggacgtgaacacagccgtggcttggtatcagcagaagcctggcaaggcccctaagctgctgatctacagcgccagctttctgtacagcggcgtgcccagcagattcagcggaagcagaagcggcaccgacttcaccctgacaatatccagcctccagcctgaggacttcgccacctactactgccagcaggcttacaccacacctccaacattcggccagggcaccaaggtggaaatcaagagaacactcgagatccagaaccctgatcctgccgtgtaccagctgcgggatagcaagagcagcgacaagagcgtgtgtctgttcaccgacttcgacagccagaccaacgtgtcccagagcaaggactccgacgtgtacatcaccgataagtgcgtgctggacatgcggagcatggacttcaagagcaactccgccgtggcctggtccaacaagtccgatttcgcctgcgccaacgccttcaacaacagcattatccccgaggacacattcttcccaagccccgagagcagctgcgacgtgaagctggtggaaaagagcttcgagacagacaccaacctgaacttccagaacctgagcgtgatcggcttcagaatcctgctgctgaaagtggccggctttaacctgctgatgaccctgcggctgtggtccagctctagtcgcgccaagagaagcggatctggcgtgaagcagaccctgaatttcgacctgctgaagctggctggcgacgtggaatccaacccaggccctactagtatggactggatttggcgcatccttttccttgtcggcgctgctaccggcgcgcattccttcgaagtgcagctggttgaatcaggtggcggcctggttcaacctggcggatctctgagactgagctgtgccgccagcggcttcaacatcaaggacacctacatccactgggtccgacaggcccctggcaaaggacttgaatgggtcgccagaatctaccccaccaacggctacaccagatacgccgactctgtgaagggcagattcaccatcagcgccgacaccagcaagaacaccgcctacctccagatgaactccctgagagccgaggacaccgccgtgtactactgtagcagatggggcggctggggcttctacgctatggattattggggccagggaaccctggtcaccgtgtcatctacgcgtgaggacctgaagaacgtgttcccacctgaggtggccgtgttcgagcctagcgaggccgagatcagccacacccagaaagccaccctcgtgtgcctggctaccggcttctaccccgaccatgtggaactgtcttggtgggtcaacggcaaagaggtgcacagcggcgtgtgtaccgacccccagccactgaaagaacagcccgccctgaacgacagccggtactgcctgagcagcagactgagagtgtccgccaccttctggcagaacccccggaaccacttcagatgccaggtgcagttctacggcctgagcgagaacgacgagtggacccaggacagagccaagcccgtgacccagatcgtgtctgccgaagcctggggtagagccgattgcggctttaccagcgagagctaccagcagggcgtgctgagcgccaccatcctgtacgagatcctgctgggcaaggccaccctgtacgccgtgctggtgtctgccctggtgctgatggctatggtcaagcggaaggacagccggggataa

SEQ ID NO: 21895 - DNA, 2655 bp, Artificial Sequence
  Synthetic Polynucleotide
atggccttaccagtgaccgccttgctcctgccgctggccttgctgctccacgccgccaggccggacatccagatgacacagagccctagcagcctgtctgccagcgtgggagacagagtgaccatcacctgtagagccagccaggacgtgaacacagccgtggcttggtatcagcagaagcctggcaaggcccctaagctgctgatctacagcgccagctttctgtacagcggcgtgcccagcagattcagcggaagcagaagcggcaccgacttcaccctgacaatatccagcctccagcctgaggacttcgccacctactactgccagcaggcttacaccacacctccaacattcggccagggcaccaaggtggaaatcaagagaacactcgaggggaaaccaattcccaaccctcttctgggactggattcaaccggcagcggcgaggacctgaagaacgtgttcccacctgaggtggccgtgttcgagcctagcaaggccgagatcgcccacacccagaaagccaccctcgtgtgcctggctaccggcttctaccccgaccatgtggaactgtcttggtgggtcaacggcaaagaggtgcacagcggcgtgtgtaccgacccccagccactgaaagaacagcccgccctgaacgacagccggtactgcctgagcagcagactgagagtgtccgccaccttctggcagaacccccggaaccacttcagatgccaggtgcagttctacggcctgagcgagaacgacgagtggacccaggacagagccaagcccgtgacccagatcgtgtctgccgaagcctggggcagagccgattgcggcatcaccagcgccagctaccaccagggcgtgctgagcgccaccatcctgtacgagatcctgctgggcaaggccaccctgtacgccgtgctggtgtctgccctggtgctgatggctatggtcaagcggaaggacagccggggaagggccaagcgatctggatctggagcaacaaacttctcactactcaaacaagcaggtgacgtggaggagaatcccgggcctactagtatggactggatttggcgcatccttttccttgtcggcgctgctaccggcgcgcattccttcgaagtgcaactggtggaatctggcggcggactggtgcagcctggcggatctctgagactgagctgtgccgccagcggcttcaacatcaaggacacctacatccactgggtgcgccaggcccctggaaagggactggaatgggtggcccggatctaccccaccaacggctacaccagatacgccgacagcgtgaagggccggttcaccatcagcgccgacaccagcaagaataccgcctacctccagatgaacagcctgcgggccgaggataccgccgtgtactactgctcaagatggggaggcgacggcttctacgctatggacgtgtggggccagggcacccttgtgaccgtgtcatctacgcgtgagcagaaactgatctcggaagaggatgggagcggcatccagaaccctgatcctgccgtgtaccagctgcgggatagcaagagcagcgacaagagcgtgtgtctgttcaccgacttcgacagccagaccaacgtgtcccagagcaaggactccgacgtgtacatcaccgataagtgcgtgctggacatgcggagcatggacttcaagagcaactccgccgtggcctggtccaacaagtccgatttcgcctgcgccaacgccttcaacaacagcattatccccgaggacacattcttcccaagcagcgacgtgccctgcgacgtgaagctggtggaaaagagcttcgagacagacaccaacctgaacttccagaacctgagcgtgatcggcttcagaatcctgctgctgaaagtggccggctttaacctgctgatgaccctgcggctgtggtccagccgcgccaagagaagcggatctggcgtgaagcagaccctgaatttcgacctgctgaagctggctggcgacgtggaatccaacccaggcccttctagaggccatatgaccgagtacaagcccacggtgcgcctcgccacccgcgacgacgtccccagggccgtacgcaccctcgccgccgcgttcgccgactaccccgccacgcgccacaccgtcgatccggaccgccacatcgagcgggtcaccgagctgcaagaactcttcctcacgcgcgtcgggctcgacatcggcaaggtgtgggtcgcggacgacggcgccgcggtggcggtctggaccacgccggagagcgtcgaagcgggggcggtgttcgccgagatcggcccgcgcatggccgagttgagcggttcccggctggccgcgcagcaacagatggaaggcctcctggcgccgcaccggcccaaggagcccgcgtggttcctggccaccgtcggcgtctcgcccgaccaccagggcaagggtctgggcagcgccgtcgtgctccccggagtggaggcggccgagcgcgccggggtgcccgccttcctggagacctccgcgccccgcaacctccccttctacgagcggctcggcttcaccgtcaccgccgacgtcgaggtgcccgaaggaccgcgcacctggtgcatgacccgcaagcccggtgcctga

SEQ ID NO: 21896 - DNA, 1884 bp, Artificial Sequence
  Synthetic Polynucleotide
atggccttaccagtgaccgccttgctcctgccgctggccttgctgctccacgccgccaggccggacatccagatgacacagagccctagcagcctgtctgccagcgtgggagacagagtgaccatcacctgtagagccagccaggacgtgaacacagccgtggcttggtatcagcagaagcctggcaaggcccctaagctgctgatctacagcgccagctttctgtacagcggcgtgcccagcagattcagcggaagcagaagcggcaccgacttcaccctgacaatatccagcctccagcctgaggacttcgccacctactactgccagcagcactacaccacacctccaacattcggccagggcaccaaggtggaaatcaagagaacactcgagatccagaaccctgatcctgccgtgtaccagctgcgggatagcaagagcagcgacaagagcgtgtgtctgttcaccgacttcgacagccagaccaacgtgtcccagagcaaggactccgacgtgtacatcaccgataagtgcgtgctggacatgcggagcatggacttcaagagcaactccgccgtggcctggtccaacaagtccgatttcgcctgcgccaacgccttcaacaacagcattatccccgaggacacattcttcccaagccccgagagcagctgcgacgtgaagctggtggaaaagagcttcgagacagacaccaacctgaacttccagaacctgagcgtgatcggcttcagaatcctgctgctgaaagtggccggctttaacctgctgatgaccctgcggctgtggtccagctctagtcgcgccaagagaagcggatctggcgtgaagcagaccctgaatttcgacctgctgaagctggctggcgacgtggaatccaacccaggccctactagtatggactggatttggcgcatccttttccttgtcggcgctgctaccggcgcgcattccttcgaagtgcagctggttgaatcaggtggcggcctggttcaacctggcggatctctgagactgagctgtgccgccagcggcttcaacatcaaggacacctacatccactgggtccgacaggcccctggcaaaggacttgaatgggtcgccagaatctaccccaccaacggctacaccagatacgccgactctgtgaagggcagattcaccatcagcgccgacaccagcaagaacaccgcctacctccagatgaactccctgagagccgaggacaccgccgtgtactactgtagcagatggggcggagccggagcctacgctatggatgtttggggccagggaaccctggtcaccgtgtcatctacgcgtgaggacctgaagaacgtgttcccacctgaggtggccgtgttcgagcctagcgaggccgagatcagccacacccagaaagccaccctcgtgtgcctggctaccggcttctaccccgaccatgtggaactgtcttggtgggtcaacggcaaagaggtgcacagcggcgtgtgtaccgacccccagccactgaaagaacagcccgccctgaacgacagccggtactgcctgagcagcagactgagagtgtccgccaccttctggcagaacccccggaaccacttcagatgccaggtgcagttctacggcctgagcgagaacgacgagtggacccaggacagagccaagcccgtgacccagatcgtgtctgccgaagcctggggcagagccgattgcggctttaccagcgagagctaccagcagggcgtgctgagcgccaccatcctgtacgagatcctgctgggcaaggccaccctgtacgccgtgctggtgtctgccctggtgctgatggctatggtcaagcggaaggacagccggggataa

SEQ ID NO: 21897 - DNA, 2649 bp, Artificial Sequence
  Synthetic Polynucleotide
atggccttaccagtgaccgccttgctcctgccgctggccttgctgctccacgccgccaggccggacatccagatgacccagagccccagcagcctgtctgccagcgtgggcgacagagtgaccatcacctgtagagccagccaggacgtgaacaccgccgtggcctggtatcagcagaagcctggcaaggcccccaagctgctgatctacagcgccagcttcctggaaagcggcgtgcccagcagattcagcggaagcagaagcggcaccgacttcaccctgaccatcagctccctccagcccgaggacttcgccacctactactgccagcagcactacaccacccctcccaccttcggccagaccaaggtggaaatcaagagactcgaggggaaaccaattcccaaccctcttctgggactggattcaaccggcagcggcgaggacctgaagaacgtgttcccacctgaggtggccgtgttcgagcctagcaaggccgagatcgcccacacccagaaagccaccctcgtgtgcctggctaccggcttctaccccgaccatgtggaactgtcttggtgggtcaacggcaaagaggtgcacagcggcgtgtgtaccgacccccagccactgaaagaacagcccgccctgaacgacagccggtactgcctgagcagcagactgagagtgtccgccaccttctggcagaacccccggaaccacttcagatgccaggtgcagttctacggcctgagcgagaacgacgagtggacccaggacagagccaagcccgtgacccagatcgtgtctgccgaagcctggggcagagccgattgcggcatcaccagcgccagctaccaccagggcgtgctgagcgccaccatcctgtacgagatcctgctgggcaaggccaccctgtacgccgtgctggtgtctgccctggtgctgatggctatggtcaagcggaaggacagccggggaagggccaagcgatctggatctggagcaacaaacttctcactactcaaacaagcaggtgacgtggaggagaatcccgggcctactagtatggactggatttggcgcatccttttccttgtcggcgctgctaccggcgcgcattccttcgaagtgcagctggttgaatcaggtggcggcctggttcaacctggcggatctctgagactgagctgtgccgccagcggcttcaacatcaaggacacctacatccactgggtccgacaggcccctggcaaaggacttgaatgggtcgccagaatctaccccaccaacggctacaccagatacgccgactctgtgaagggcagattcaccatcagcgccgacaccagcaagaacaccgcctacctccagatgaactccctgagagccgaggacaccgccgtgtactactgtagcagatggggcggagccggagcctacgctatggatgtttggggccagggaaccctggtcaccgtgtcatctacgcgtgagcagaaactgatctcggaagaggatgggagcggcatccagaaccctgatcctgccgtgtaccagctgcgggatagcaagagcagcgacaagagcgtgtgtctgttcaccgacttcgacagccagaccaacgtgtcccagagcaaggactccgacgtgtacatcaccgataagtgcgtgctggacatgcggagcatggacttcaagagcaactccgccgtggcctggtccaacaagtccgatttcgcctgcgccaacgccttcaacaacagcattatccccgaggacacattcttcccaagcagcgacgtgccctgcgacgtgaagctggtggaaaagagcttcgagacagacaccaacctgaacttccagaacctgagcgtgatcggcttcagaatcctgctgctgaaagtggccggctttaacctgctgatgaccctgcggctgtggtccagccgcgccaagagaagcggatctggcgtgaagcagaccctgaatttcgacctgctgaagctggctggcgacgtggaatccaacccaggcccttctagaggccatatgaccgagtacaagcccacggtgcgcctcgccacccgcgacgacgtccccagggccgtacgcaccctcgccgccgcgttcgccgactaccccgccacgcgccacaccgtcgatccggaccgccacatcgagcgggtcaccgagctgcaagaactcttcctcacgcgcgtcgggctcgacatcggcaaggtgtgggtcgcggacgacggcgccgcggtggcggtctggaccacgccggagagcgtcgaagcgggggcggtgttcgccgagatcggcccgcgcatggccgagttgagcggttcccggctggccgcgcagcaacagatggaaggcctcctggcgccgcaccggcccaaggagcccgcgtggttcctggccaccgtcggcgtctcgcccgaccaccagggcaagggtctgggcagcgccgtcgtgctccccggagtggaggcggccgagcgcgccggggtgcccgccttcctggagacctccgcgccccgcaacctccccttctacgagcggctcggcttcaccgtcaccgccgacgtcgaggtgcccgaaggaccgcgcacctggtgcatgacccgcaagcccggtgcctga

SEQ ID NO: 21898 - DNA, 1878 bp, Artificial Sequence
  Synthetic Polynucleotide
atggccttaccagtgaccgccttgctcctgccgctggccttgctgctccacgccgccaggccggacatccagatgacccagagccccagcagcctgtctgccagcgtgggcgacagagtgaccatcacctgtagagccagccaggacgtgaacaccgccgtggcctggtatcagcagaagcctggcaaggcccccaagctgctgatctacagcgccagcttcctggaaagcggcgtgcccagcagattcagcggaagcagaagcggcaccgacttcaccctgaccatcagctccctccagcccgaggacttcgccacctactactgccagcagcactacaccacccctcccaccttcggccagaccaaggtggaaatcaagagactcgagatccagaaccctgatcctgccgtgtaccagctgcgggatagcaagagcagcgacaagagcgtgtgtctgttcaccgacttcgacagccagaccaacgtgtcccagagcaaggactccgacgtgtacatcaccgataagtgcgtgctggacatgcggagcatggacttcaagagcaactccgccgtggcctggtccaacaagtccgatttcgcctgcgccaacgccttcaacaacagcattatccccgaggacacattcttcccaagccccgagagcagctgcgacgtgaagctggtggaaaagagcttcgagacagacaccaacctgaacttccagaacctgagcgtgatcggcttcagaatcctgctgctgaaagtggccggctttaacctgctgatgaccctgcggctgtggtccagctctagtcgcgccaagagaagcggatctggcgtgaagcagaccctgaatttcgacctgctgaagctggctggcgacgtggaatccaacccaggccctactagtatggactggatttggcgcatccttttccttgtcggcgctgctaccggcgcgcattccttcgaagtgcagctggttgaatcaggtggcggcctggttcaacctggcggatctctgagactgagctgtgccgccagcggcttcaacatcaaggacacctacatccactgggtccgacaggcccctggcaaaggacttgaatgggtcgccagaatctaccccaccaacggctacaccagatacgccgactctgtgaagggcagattcaccatcagcgccgacaccagcaagaacaccgcctacctccagatgaactccctgagagccgaggacaccgccgtgtactactgtagcagatggggcggagccggagcctacgctatggatgtttggggccagggaaccctggtcaccgtgtcatctacgcgtgaggacctgaagaacgtgttcccacctgaggtggccgtgttcgagcctagcgaggccgagatcagccacacccagaaagccaccctcgtgtgcctggctaccggcttctaccccgaccatgtggaactgtcttggtgggtcaacggcaaagaggtgcacagcggcgtgtgtaccgacccccagccactgaaagaacagcccgccctgaacgacagccggtactgcctgagcagcagactgagagtgtccgccaccttctggcagaacccccggaaccacttcagatgccaggtgcagttctacggcctgagcgagaacgacgagtggacccaggacagagccaagcccgtgacccagatcgtgtctgccgaagcctggggcagagccgattgcggctttaccagcgagagctaccagcagggcgtgctgagcgccaccatcctgtacgagatcctgctgggcaaggccaccctgtacgccgtgctggtgtctgccctggtgctgatggctatggtcaagcggaaggacagccggggataa

SEQ ID NO: 21899 - DNA, 1884 bp, Artificial Sequence
  Synthetic Polynucleotide
atggccttaccagtgaccgccttgctcctgccgctggccttgctgctccacgccgccaggccggacatccagatgacacagagccctagcagcctgtctgccagcgtgggagacagagtgaccatcacctgtagagccagccaggacgtgaacacagccgtggcttggtatcagcagaagcctggcaaggcccctaagctgctgatctacagcgccagctttctgtacagcggcgtgcccagcagattcagcggaagcagaagcggcaccgacttcaccctgacaatatccagcctccagcctgaggacttcgccacctactactgccagcagcactacaccacacctccaacattcggccagggcaccaaggtggaaatcaagagaacactcgagatccagaaccctgatcctgccgtgtaccagctgcgggatagcaagagcagcgacaagagcgtgtgtctgttcaccgacttcgacagccagaccaacgtgtcccagagcaaggactccgacgtgtacatcaccgataagtgcgtgctggacatgcggagcatggacttcaagagcaactccgccgtggcctggtccaacaagtccgatttcgcctgcgccaacgccttcaacaacagcattatccccgaggacacattcttcccaagccccgagagcagctgcgacgtgaagctggtggaaaagagcttcgagacagacaccaacctgaacttccagaacctgagcgtgatcggcttcagaatcctgctgctgaaagtggccggctttaacctgctgatgaccctgcggctgtggtccagctctagtcgcgccaagagaagcggatctggcgtgaagcagaccctgaatttcgacctgctgaagctggctggcgacgtggaatccaacccaggccctactagtatggactggatttggcgcatccttttccttgtcggcgctgctaccggcgcgcattccttcgaagtgcaactggtggaatctggcggcggactggtgcagcctggcggatctctgagactgagctgtgccgccagcggcttcaacatcaaggacacctacatccactgggtgcgccaggcccctggaaagggactggaatgggtggcccggatctaccccaccaacggctacaccagatacgccgacagcgtgaagggccggttcaccatcagcgccgacaccagcaagaataccgcctacctccagatgaacagcctgcgggccgaggataccgccgtgtactactgctcaagatggggaggcgacggcttcgctgctatggacgtgtggggccagggcacccttgtgaccgtgtcatctacgcgtgaggacctgaagaacgtgttcccacctgaggtggccgtgttcgagcctagcgaggccgagatcagccacacccagaaagccaccctcgtgtgcctggctaccggcttctaccccgaccatgtggaactgtcttggtgggtcaacggcaaagaggtgcacagcggcgtgtgtaccgacccccagccactgaaagaacagcccgccctgaacgacagccggtactgcctgagcagcagactgagagtgtccgccaccttctggcagaacccccggaaccacttcagatgccaggtgcagttctacggcctgagcgagaacgacgagtggacccaggacagagccaagcccgtgacccagatcgtgtctgccgaagcctggggcagagccgattgcggctttaccagcgagagctaccagcagggcgtgctgagcgccaccatcctgtacgagatcctgctgggcaaggccaccctgtacgccgtgctggtgtctgccctggtgctgatggctatggtcaagcggaaggacagccggggataa

SEQ ID NO: 21900 - DNA, 27 bp, Artificial Sequence
  Synthetic Polynucleotide
ggggggggggggggggggggggggggg

SEQ ID NO: 21901 - DNA, 2202 bp, Artificial Sequence
  Synthetic Polynucleotide
atggccttaccagtgaccgccttgctcctgccgctggccttgctgctccacgccgccaggccggaggttcagctgcttgagtctggcggaggactggttcaacctggcggaagcctgagactgtcttgtgccgccagcggcttcacctttagcagctacgccatgagctgggtccgacaggctcctggcaaaggactggaatgggtgtccagcatcagcggcagcggcgactacatctactacgccgatagcgtgaagggcagattcaccatcagccgggacatcagcaagaacaccctgtacctccagatgaacagcctgagagccgaggacaccgccgtgtactactgtgccaaagaaggcaccggcgctaacagcagcctggccgattatagaggccagggcacactggtcaccgtgtctagtctcgagagcggcggaggcggatctttcgaagttcagctggttgaatctggcggcggactggttcaacctggcggatctctgagactgagctgtgccgcctctggctacgcctttagcagctactgggtcaactgggttcgacaggcccctggcaaaggactggaatgggtcgcccaaatctatcccggcgacggcgacaccaactacaacggcaagttcaagggcagattcaccatcagccgggacaacagcaagaacaccctgtacctccagatgaactccctgagagccgaggacaccgccgtgtactattgtgccagatccatcaccaccgtcgtgggctgcgctatggattatagaggccagggaaccctggtcaccgtgtcctctacgcgtgagcagaaactgatctcggaagaggatctggcgaagcccaccacgacgccagcgccgcgaccaccaacaccggcgcccaccatcgcgtcgcagcccctgtccctgcgcccagaggcgtgccggccagcggcggggggcgcagtgcacacgagggggctggacttcgcctgtgacatctacatctgggcgcccttggccgggacttgtggggtccttctcctgtcactggttatcaccctttactgcaaacggggcagaaagaaactcctgtatatattcaaacaaccatttatgagaccagtacaaactactcaagaggaagatggctgtagctgccgatttccagaagaagaagaaggaggatgtgaactgagagtgaagttcagcaggagcgcagacgcccccgcgtaccagcagggccagaaccagctctataacgagctgaatctaggacgaagagaggagtacgatgttttggacaagagacgtggccgggaccctgagatggggggaaagccgagaaggaagaaccctcaggaaggcctgtacaatgaactgcagaaagataagatggcggaggcctacagtgagattgggatgaaaggcgagcgccggaggggcaaggggcacgatggcctttaccagggtctcagtacagccaccaaggacacctacgacgcccttcacatgcaggccctgccccctcgctctagtggctccggcgagggcagaggaagtctactaacctgcggagatgtggaagaaaatcctggcccacatatgaccgagtacaagcccacggtgcgcctcgccacccgcgacgacgtccccagggccgtacgcaccctcgccgccgcgttcgccgactaccccgccacgcgccacaccgtcgatccggaccgccacatcgagcgggtcaccgagctgcaagaactcttcctcacgcgcgtcgggctcgacatcggcaaggtgtgggtcgcggacgacggcgccgcggtggcggtctggaccacgccggagagcgtcgaagcgggggcggtgttcgccgagatcggcccgcgcatggccgagttgagcggttcccggctggccgcgcagcaacagatggaaggcctcctggcgccgcaccggcccaaggagcccgcgtggttcctggccaccgtcggcgtctcgcccgaccaccagggcaagggtctgggcagcgccgtcgtgctccccggagtggaggcggccgagcgcgccggggtgcccgccttcctggagacctccgcgccccgcaacctccccttctacgagcggctcggcttcaccgtcaccgccgacgtcgaggtgcccgaaggaccgcgcacctggtgcatgacccgcaagcccggtgcctga

SEQ ID NO: 21902 - DNA, 2193 bp, Artificial Sequence
  Synthetic Polynucleotide
atggccttaccagtgaccgccttgctcctgccgctggccttgctgctccacgccgccaggccgcaggtgcagctggttgaatctggcggaggactggttcagcctggcggatctctgagactgtcttgtgccgccagcggcttcaccttcaccaatcacgccatgagctgggtccgacaggcccctggaaaaggactggaactggtgtctagcatcagcggcaacggcagaaccacctactacgccgatagcgtgaagggcagattcaccatcagccgggacatcagcaagaacaccctggacctccagatgaacagcctgagagccgaggataccgccgtgtactactgtgccaaggatggcggagagacactggtggatagcagaggccagggcacactggtcacagtgtcatctctcgagagcggcggaggcggatctttcgaagttcagctggttgaatctggcggcggactggttcaacctggcggatctctgagactgagctgtgccgcctctggctacgcctttagcagctactgggtcaactgggttcgacaggcccctggcaaaggactggaatgggtcgcccaaatctatcccggcgacggcgacaccaactacaacggcaagttcaagggcagattcaccatcagccgggacaacagcaagaacaccctgtacctccagatgaactccctgagagccgaggacaccgccgtgtactattgtgccagatccatcaccaccgtcgtgggctgcgctatggattatagaggccagggaaccctggtcaccgtgtcctctacgcgtgagcagaaactgatctcggaagaggatctggcgaagcccaccacgacgccagcgccgcgaccaccaacaccggcgcccaccatcgcgtcgcagcccctgtccctgcgcccagaggcgtgccggccagcggcggggggcgcagtgcacacgagggggctggacttcgcctgtgacatctacatctgggcgcccttggccgggacttgtggggtccttctcctgtcactggttatcaccctttactgcaaacggggcagaaagaaactcctgtatatattcaaacaaccatttatgagaccagtacaaactactcaagaggaagatggctgtagctgccgatttccagaagaagaagaaggaggatgtgaactgagagtgaagttcagcaggagcgcagacgcccccgcgtaccagcagggccagaaccagctctataacgagctgaatctaggacgaagagaggagtacgatgttttggacaagagacgtggccgggaccctgagatggggggaaagccgagaaggaagaaccctcaggaaggcctgtacaatgaactgcagaaagataagatggcggaggcctacagtgagattgggatgaaaggcgagcgccggaggggcaaggggcacgatggcctttaccagggtctcagtacagccaccaaggacacctacgacgcccttcacatgcaggccctgccccctcgctctagtggctccggcgagggcagaggaagtctactaacctgcggagatgtggaagaaaatcctggcccacatatgaccgagtacaagcccacggtgcgcctcgccacccgcgacgacgtccccagggccgtacgcaccctcgccgccgcgttcgccgactaccccgccacgcgccacaccgtcgatccggaccgccacatcgagcgggtcaccgagctgcaagaactcttcctcacgcgcgtcgggctcgacatcggcaaggtgtgggtcgcggacgacggcgccgcggtggcggtctggaccacgccggagagcgtcgaagcgggggcggtgttcgccgagatcggcccgcgcatggccgagttgagcggttcccggctggccgcgcagcaacagatggaaggcctcctggcgccgcaccggcccaaggagcccgcgtggttcctggccaccgtcggcgtctcgcccgaccaccagggcaagggtctgggcagcgccgtcgtgctccccggagtggaggcggccgagcgcgccggggtgcccgccttcctggagacctccgcgccccgcaacctccccttctacgagcggctcggcttcaccgtcaccgccgacgtcgaggtgcccgaaggaccgcgcacctggtgcatgacccgcaagcccggtgcctga

SEQ ID NO: 21903 - DNA, 2205 bp, Artificial Sequence
  Synthetic Polynucleotide
atggccttaccagtgaccgccttgctcctgccgctggccttgctgctccacgccgccaggccggaggttcagctgcttgagtctggcggaggactggttcaacctggcggaagcctgagactgtcttgtgccgccagcggcttcacctttagcagctacgccatgagctgggtccgacaggctcctggcaaaggactggaatgggtgtccagcatcagcggcagcggcgactacatctactacgccgatagcgtgaagggcagattcaccatcagccgggacatcagcaagaacaccctgtacctccagatgaacagcctgagagccgaggacaccgccgtgtactactgtgccaaagaaggcaccggcgctaacagcagcctggccgattatagaggccagggcacactggtcaccgtgtctagtctcgagagcggcggaggcggatctttcgaagaggttcagctgcttgagtctggcggaggactggttcaacctggcggaagcctgagactgtcttgtgccgccagcggcttcacctttagcagctacgccatgagctgggtccgacaggctcctggcaaaggactggaatgggtgtccagcatcagcggcagcggcgactacatctactacgccgatagcgtgaagggcagattcaccatcagccgggacatcagcaagaacaccctgtacctccagatgaacagcctgagagccgaggacaccgccgtgtactactgtgccaaagaaggcaccggcgctaacagcagcctggccgattatagaggccagggcacactggtcaccgtgtctagtacgcgtgagcagaaactgatctcggaagaggatctggcgaagcccaccacgacgccagcgccgcgaccaccaacaccggcgcccaccatcgcgtcgcagcccctgtccctgcgcccagaggcgtgccggccagcggcggggggcgcagtgcacacgagggggctggacttcgcctgtgacatctacatctgggcgcccttggccgggacttgtggggtccttctcctgtcactggttatcaccctttactgcaaacggggcagaaagaaactcctgtatatattcaaacaaccatttatgagaccagtacaaactactcaagaggaagatggctgtagctgccgatttccagaagaagaagaaggaggatgtgaactgagagtgaagttcagcaggagcgcagacgcccccgcgtaccagcagggccagaaccagctctataacgagctgaatctaggacgaagagaggagtacgatgttttggacaagagacgtggccgggaccctgagatggggggaaagccgagaaggaagaaccctcaggaaggcctgtacaatgaactgcagaaagataagatggcggaggcctacagtgagattgggatgaaaggcgagcgccggaggggcaaggggcacgatggcctttaccagggtctcagtacagccaccaaggacacctacgacgcccttcacatgcaggccctgccccctcgctctagtggctccggcgagggcagaggaagtctactaacctgcggagatgtggaagaaaatcctggcccacatatgaccgagtacaagcccacggtgcgcctcgccacccgcgacgacgtccccagggccgtacgcaccctcgccgccgcgttcgccgactaccccgccacgcgccacaccgtcgatccggaccgccacatcgagcgggtcaccgagctgcaagaactcttcctcacgcgcgtcgggctcgacatcggcaaggtgtgggtcgcggacgacggcgccgcggtggcggtctggaccacgccggagagcgtcgaagcgggggcggtgttcgccgagatcggcccgcgcatggccgagttgagcggttcccggctggccgcgcagcaacagatggaaggcctcctggcgccgcaccggcccaaggagcccgcgtggttcctggccaccgtcggcgtctcgcccgaccaccagggcaagggtctgggcagcgccgtcgtgctccccggagtggaggcggccgagcgcgccggggtgcccgccttcctggagacctccgcgccccgcaacctccccttctacgagcggctcggcttcaccgtcaccgccgacgtcgaggtgcccgaaggaccgcgcacctggtgcatgacccgcaagcccggtgcctga

SEQ ID NO: 21904 - DNA, 2196 bp, Artificial Sequence
  Synthetic Polynucleotide
atggccttaccagtgaccgccttgctcctgccgctggccttgctgctccacgccgccaggccggaggttcagctgcttgagtctggcggaggactggttcaacctggcggaagcctgagactgtcttgtgccgccagcggcttcacctttagcagctacgccatgagctgggtccgacaggctcctggcaaaggactggaatgggtgtccagcatcagcggcagcggcgactacatctactacgccgatagcgtgaagggcagattcaccatcagccgggacatcagcaagaacaccctgtacctccagatgaacagcctgagagccgaggacaccgccgtgtactactgtgccaaagaaggcaccggcgctaacagcagcctggccgattatagaggccagggcacactggtcaccgtgtctagtctcgagagcggcggaggcggatctttcgaacaggtgcagctggttgaatctggcggaggactggttcagcctggcggatctctgagactgtcttgtgccgccagcggcttcaccttcaccaatcacgccatgagctgggtccgacaggcccctggaaaaggactggaactggtgtctagcatcagcggcaacggcagaaccacctactacgccgatagcgtgaagggcagattcaccatcagccgggacatcagcaagaacaccctggacctccagatgaacagcctgagagccgaggataccgccgtgtactactgtgccaaggatggcggagagacactggtggatagcagaggccagggcacactggtcacagtgtcatctacgcgtgagcagaaactgatctcggaagaggatctggcgaagcccaccacgacgccagcgccgcgaccaccaacaccggcgcccaccatcgcgtcgcagcccctgtccctgcgcccagaggcgtgccggccagcggcggggggcgcagtgcacacgagggggctggacttcgcctgtgacatctacatctgggcgcccttggccgggacttgtggggtccttctcctgtcactggttatcaccctttactgcaaacggggcagaaagaaactcctgtatatattcaaacaaccatttatgagaccagtacaaactactcaagaggaagatggctgtagctgccgatttccagaagaagaagaaggaggatgtgaactgagagtgaagttcagcaggagcgcagacgcccccgcgtaccagcagggccagaaccagctctataacgagctgaatctaggacgaagagaggagtacgatgttttggacaagagacgtggccgggaccctgagatggggggaaagccgagaaggaagaaccctcaggaaggcctgtacaatgaactgcagaaagataagatggcggaggcctacagtgagattgggatgaaaggcgagcgccggaggggcaaggggcacgatggcctttaccagggtctcagtacagccaccaaggacacctacgacgcccttcacatgcaggccctgccccctcgctctagtggctccggcgagggcagaggaagtctactaacctgcggagatgtggaagaaaatcctggcccacatatgaccgagtacaagcccacggtgcgcctcgccacccgcgacgacgtccccagggccgtacgcaccctcgccgccgcgttcgccgactaccccgccacgcgccacaccgtcgatccggaccgccacatcgagcgggtcaccgagctgcaagaactcttcctcacgcgcgtcgggctcgacatcggcaaggtgtgggtcgcggacgacggcgccgcggtggcggtctggaccacgccggagagcgtcgaagcgggggcggtgttcgccgagatcggcccgcgcatggccgagttgagcggttcccggctggccgcgcagcaacagatggaaggcctcctggcgccgcaccggcccaaggagcccgcgtggttcctggccaccgtcggcgtctcgcccgaccaccagggcaagggtctgggcagcgccgtcgtgctccccggagtggaggcggccgagcgcgccggggtgcccgccttcctggagacctccgcgccccgcaacctccccttctacgagcggctcggcttcaccgtcaccgccgacgtcgaggtgcccgaaggaccgcgcacctggtgcatgacccgcaagcccggtgcctga

SEQ ID NO: 21905 - DNA, 2196 bp, Artificial Sequence
  Synthetic Polynucleotide
atggccttaccagtgaccgccttgctcctgccgctggccttgctgctccacgccgccaggccgcaggtgcagctggttgaatctggcggaggactggttcagcctggcggatctctgagactgtcttgtgccgccagcggcttcaccttcaccaatcacgccatgagctgggtccgacaggcccctggaaaaggactggaactggtgtctagcatcagcggcaacggcagaaccacctactacgccgatagcgtgaagggcagattcaccatcagccgggacatcagcaagaacaccctggacctccagatgaacagcctgagagccgaggataccgccgtgtactactgtgccaaggatggcggagagacactggtggatagcagaggccagggcacactggtcacagtgtcatctctcgagagcggcggaggcggatctttcgaagaggttcagctgcttgagtctggcggaggactggttcaacctggcggaagcctgagactgtcttgtgccgccagcggcttcacctttagcagctacgccatgagctgggtccgacaggctcctggcaaaggactggaatgggtgtccagcatcagcggcagcggcgactacatctactacgccgatagcgtgaagggcagattcaccatcagccgggacatcagcaagaacaccctgtacctccagatgaacagcctgagagccgaggacaccgccgtgtactactgtgccaaagaaggcaccggcgctaacagcagcctggccgattatagaggccagggcacactggtcaccgtgtctagtacgcgtgagcagaaactgatctcggaagaggatctggcgaagcccaccacgacgccagcgccgcgaccaccaacaccggcgcccaccatcgcgtcgcagcccctgtccctgcgcccagaggcgtgccggccagcggcggggggcgcagtgcacacgagggggctggacttcgcctgtgacatctacatctgggcgcccttggccgggacttgtggggtccttctcctgtcactggttatcaccctttactgcaaacggggcagaaagaaactcctgtatatattcaaacaaccatttatgagaccagtacaaactactcaagaggaagatggctgtagctgccgatttccagaagaagaagaaggaggatgtgaactgagagtgaagttcagcaggagcgcagacgcccccgcgtaccagcagggccagaaccagctctataacgagctgaatctaggacgaagagaggagtacgatgttttggacaagagacgtggccgggaccctgagatggggggaaagccgagaaggaagaaccctcaggaaggcctgtacaatgaactgcagaaagataagatggcggaggcctacagtgagattgggatgaaaggcgagcgccggaggggcaaggggcacgatggcctttaccagggtctcagtacagccaccaaggacacctacgacgcccttcacatgcaggccctgccccctcgctctagtggctccggcgagggcagaggaagtctactaacctgcggagatgtggaagaaaatcctggcccacatatgaccgagtacaagcccacggtgcgcctcgccacccgcgacgacgtccccagggccgtacgcaccctcgccgccgcgttcgccgactaccccgccacgcgccacaccgtcgatccggaccgccacatcgagcgggtcaccgagctgcaagaactcttcctcacgcgcgtcgggctcgacatcggcaaggtgtgggtcgcggacgacggcgccgcggtggcggtctggaccacgccggagagcgtcgaagcgggggcggtgttcgccgagatcggcccgcgcatggccgagttgagcggttcccggctggccgcgcagcaacagatggaaggcctcctggcgccgcaccggcccaaggagcccgcgtggttcctggccaccgtcggcgtctcgcccgaccaccagggcaagggtctgggcagcgccgtcgtgctccccggagtggaggcggccgagcgcgccggggtgcccgccttcctggagacctccgcgccccgcaacctccccttctacgagcggctcggcttcaccgtcaccgccgacgtcgaggtgcccgaaggaccgcgcacctggtgcatgacccgcaagcccggtgcctga

SEQ ID NO: 21906 - DNA, 2187 bp, Artificial Sequence
  Synthetic Polynucleotide
atggccttaccagtgaccgccttgctcctgccgctggccttgctgctccacgccgccaggccgcaggtgcagctggttgaatctggcggaggactggttcagcctggcggatctctgagactgtcttgtgccgccagcggcttcaccttcaccaatcacgccatgagctgggtccgacaggcccctggaaaaggactggaactggtgtctagcatcagcggcaacggcagaaccacctactacgccgatagcgtgaagggcagattcaccatcagccgggacatcagcaagaacaccctggacctccagatgaacagcctgagagccgaggataccgccgtgtactactgtgccaaggatggcggagagacactggtggatagcagaggccagggcacactggtcacagtgtcatctctcgagagcggcggaggcggatctttcgaacaggtgcagctggttgaatctggcggaggactggttcagcctggcggatctctgagactgtcttgtgccgccagcggcttcaccttcaccaatcacgccatgagctgggtccgacaggcccctggaaaaggactggaactggtgtctagcatcagcggcaacggcagaaccacctactacgccgatagcgtgaagggcagattcaccatcagccgggacatcagcaagaacaccctggacctccagatgaacagcctgagagccgaggataccgccgtgtactactgtgccaaggatggcggagagacactggtggatagcagaggccagggcacactggtcacagtgtcatctacgcgtgagcagaaactgatctcggaagaggatctggcgaagcccaccacgacgccagcgccgcgaccaccaacaccggcgcccaccatcgcgtcgcagcccctgtccctgcgcccagaggcgtgccggccagcggcggggggcgcagtgcacacgagggggctggacttcgcctgtgacatctacatctgggcgcccttggccgggacttgtggggtccttctcctgtcactggttatcaccctttactgcaaacggggcagaaagaaactcctgtatatattcaaacaaccatttatgagaccagtacaaactactcaagaggaagatggctgtagctgccgatttccagaagaagaagaaggaggatgtgaactgagagtgaagttcagcaggagcgcagacgcccccgcgtaccagcagggccagaaccagctctataacgagctgaatctaggacgaagagaggagtacgatgttttggacaagagacgtggccgggaccctgagatggggggaaagccgagaaggaagaaccctcaggaaggcctgtacaatgaactgcagaaagataagatggcggaggcctacagtgagattgggatgaaaggcgagcgccggaggggcaaggggcacgatggcctttaccagggtctcagtacagccaccaaggacacctacgacgcccttcacatgcaggccctgccccctcgctctagtggctccggcgagggcagaggaagtctactaacctgcggagatgtggaagaaaatcctggcccacatatgaccgagtacaagcccacggtgcgcctcgccacccgcgacgacgtccccagggccgtacgcaccctcgccgccgcgttcgccgactaccccgccacgcgccacaccgtcgatccggaccgccacatcgagcgggtcaccgagctgcaagaactcttcctcacgcgcgtcgggctcgacatcggcaaggtgtgggtcgcggacgacggcgccgcggtggcggtctggaccacgccggagagcgtcgaagcgggggcggtgttcgccgagatcggcccgcgcatggccgagttgagcggttcccggctggccgcgcagcaacagatggaaggcctcctggcgccgcaccggcccaaggagcccgcgtggttcctggccaccgtcggcgtctcgcccgaccaccagggcaagggtctgggcagcgccgtcgtgctccccggagtggaggcggccgagcgcgccggggtgcccgccttcctggagacctccgcgccccgcaacctccccttctacgagcggctcggcttcaccgtcaccgccgacgtcgaggtgcccgaaggaccgcgcacctggtgcatgacccgcaagcccggtgcctga

SEQ ID NO: 21907 - DNA, 1095 bp, Artificial Sequence
  Synthetic Polynucleotide
atggccttaccagtgaccgccttgctcctgccgctggccttgctgctccacgccgccaggccgcaggtgcagctggttgaatctggcggaggactggttcagcctggcggatctctgagactgtcttgtgccgccagcggcttcaccttcaccaatcacgccatgagctgggtccgacaggcccctggaaaaggactggaactggtgtctagcatcagcggcaacggcagaaccacctactacgccgatagcgtgaagggcagattcaccatcagccgggacatcagcaagaacaccctggacctccagatgaacagcctgagagccgaggataccgccgtgtactactgtgccaaggatggcggagagacactggtggatagcagaggccagggcacactggtcacagtgtcatctacgcgtaccacgacgccagcgccgcgaccaccaacaccggcgcccaccatcgcgtcgcagcccctgtccctgcgcccagaggcgtgccggccagcggcggggggcgcagtgcacacgagggggctggacttcgcctgtgacatctacatctgggcgcccttggccgggacttgtggggtccttctcctgtcactggttatcaccctttactgcaaacggggcagaaagaaactcctgtatatattcaaacaaccatttatgagaccagtacaaactactcaagaggaagatggctgtagctgccgatttccagaagaagaagaaggaggatgtgaactgagagtgaagttcagcaggagcgcagacgcccccgcgtaccagcagggccagaaccagctctataacgagctgaatctaggacgaagagaggagtacgatgttttggacaagagacgtggccgggaccctgagatggggggaaagccgagaaggaagaaccctcaggaaggcctgtacaatgaactgcagaaagataagatggcggaggcctacagtgagattgggatgaaaggcgagcgccggaggggcaaggggcacgatggcctttaccagggtctcagtacagccaccaaggacacctacgacgcccttcacatgcaggccctgccccctcgctaa

SEQ ID NO: 21908 - DNA, 1101 bp, Artificial Sequence
  Synthetic Polynucleotide
atggccttaccagtgaccgccttgctcctgccgctggccttgctgctccacgccgccaggccggaggtgcagctggttgaatctggcggaggactggttcagcctggcggatctctgagactgtcctgcacattttccggcggcaccttcagcagctacacaatgggctggttcagacaggcccctggcaaagaacgggaatttgtggccgaagtccgatggggcggagtgaccacatacagcaacagcctgaaggacagattcagcatcagcgaggacagcgtgaagaacgccgtgtacctccagatgaactccctgaagcctgaggacacagccgtgtactattgtgccgctgtgcggcagatgtacatgaccgtggtgcctgattattggggccagggcacactggtcacagtgtctagcacgcgtaccacgacgccagcgccgcgaccaccaacaccggcgcccaccatcgcgtcgcagcccctgtccctgcgcccagaggcgtgccggccagcggcggggggcgcagtgcacacgagggggctggacttcgcctgtgacatctacatctgggcgcccttggccgggacttgtggggtccttctcctgtcactggttatcaccctttactgcaaacggggcagaaagaaactcctgtatatattcaaacaaccatttatgagaccagtacaaactactcaagaggaagatggctgtagctgccgatttccagaagaagaagaaggaggatgtgaactgagagtgaagttcagcaggagcgcagacgcccccgcgtaccagcagggccagaaccagctctataacgagctgaatctaggacgaagagaggagtacgatgttttggacaagagacgtggccgggaccctgagatggggggaaagccgagaaggaagaaccctcaggaaggcctgtacaatgaactgcagaaagataagatggcggaggcctacagtgagattgggatgaaaggcgagcgccggaggggcaaggggcacgatggcctttaccagggtctcagtacagccaccaaggacacctacgacgcccttcacatgcaggccctgccccctcgctaa

SEQ ID NO: 21909 - DNA, 1488 bp, Artificial Sequence
  Synthetic Polynucleotide
atggccttaccagtgaccgccttgctcctgccgctggccttgctgctccacgccgccaggccgcagctccagctgcaagagtctggacctggcctggtcaagcctagcgagacactgagcctgacctgtaccgtgtccggcgatagcatcagcagcggcgattactactggggctggatcagacagcctcctggcaaaggactggaatggatcggccacatctactacagcggcgtgacctactacaaccccagcctgaagtccagagtgaccatcagcgtggacaccagccggaaccagttctccctgaagctgtctagcgtgacagccgccgataccgccgtgtactactgcaccagagaggacagcagcaactggcggagtagaggccagggaacactggtcacagttagctctctcgagagcggcggaggcggatctttcgaagaggttcagctgcttgagtctggcggaggactggttcaacctggcggaagcctgagactgtcttgtgccgccagcggcttcacctttagcagctacgccatgagctgggtccgacaggctcctggcaaaggactggaatgggtgtccagcatcagcggcagcggcgactacatctactacgccgatagcgtgaagggcagattcaccatcagccgggacatcagcaagaacaccctgtacctccagatgaacagcctgagagccgaggacaccgccgtgtactactgtgccaaagaaggcaccggcgctaacagcagcctggccgattatagaggccagggcacactggtcaccgtgtctagtacgcgtaccacgacgccagcgccgcgaccaccaacaccggcgcccaccatcgcgtcgcagcccctgtccctgcgcccagaggcgtgccggccagcggcggggggcgcagtgcacacgagggggctggacttcgcctgtgacatctacatctgggcgcccttggccgggacttgtggggtccttctcctgtcactggttatcaccctttactgcaaacggggcagaaagaaactcctgtatatattcaaacaaccatttatgagaccagtacaaactactcaagaggaagatggctgtagctgccgatttccagaagaagaagaaggaggatgtgaactgagagtgaagttcagcaggagcgcagacgcccccgcgtaccagcagggccagaaccagctctataacgagctgaatctaggacgaagagaggagtacgatgttttggacaagagacgtggccgggaccctgagatggggggaaagccgagaaggaagaaccctcaggaaggcctgtacaatgaactgcagaaagataagatggcggaggcctacagtgagattgggatgaaaggcgagcgccggaggggcaaggggcacgatggcctttaccagggtctcagtacagccaccaaggacacctacgacgcccttcacatgcaggccctgccccctcgctaa

SEQ ID NO: 21910 - DNA, 1479 bp, Artificial Sequence
  Synthetic Polynucleotide
atggccttaccagtgaccgccttgctcctgccgctggccttgctgctccacgccgccaggccgcagctccagctgcaagagtctggacctggcctggtcaagcctagcgagacactgagcctgacctgtaccgtgtccggcgatagcatcagcagcggcgattactactggggctggatcagacagcctcctggcaaaggactggaatggatcggccacatctactacagcggcgtgacctactacaaccccagcctgaagtccagagtgaccatcagcgtggacaccagccggaaccagttctccctgaagctgtctagcgtgacagccgccgataccgccgtgtactactgcaccagagaggacagcagcaactggcggagtagaggccagggaacactggtcacagttagctctctcgagagcggcggaggcggatctttcgaacaggtgcagctggttgaatctggcggaggactggttcagcctggcggatctctgagactgtcttgtgccgccagcggcttcaccttcaccaatcacgccatgagctgggtccgacaggcccctggaaaaggactggaactggtgtctagcatcagcggcaacggcagaaccacctactacgccgatagcgtgaagggcagattcaccatcagccgggacatcagcaagaacaccctggacctccagatgaacagcctgagagccgaggataccgccgtgtactactgtgccaaggatggcggagagacactggtggatagcagaggccagggcacactggtcacagtgtcatctacgcgtaccacgacgccagcgccgcgaccaccaacaccggcgcccaccatcgcgtcgcagcccctgtccctgcgcccagaggcgtgccggccagcggcggggggcgcagtgcacacgagggggctggacttcgcctgtgacatctacatctgggcgcccttggccgggacttgtggggtccttctcctgtcactggttatcaccctttactgcaaacggggcagaaagaaactcctgtatatattcaaacaaccatttatgagaccagtacaaactactcaagaggaagatggctgtagctgccgatttccagaagaagaagaaggaggatgtgaactgagagtgaagttcagcaggagcgcagacgcccccgcgtaccagcagggccagaaccagctctataacgagctgaatctaggacgaagagaggagtacgatgttttggacaagagacgtggccgggaccctgagatggggggaaagccgagaaggaagaaccctcaggaaggcctgtacaatgaactgcagaaagataagatggcggaggcctacagtgagattgggatgaaaggcgagcgccggaggggcaaggggcacgatggcctttaccagggtctcagtacagccaccaaggacacctacgacgcccttcacatgcaggccctgccccctcgctaa

SEQ ID NO: 21911 - DNA, 1479 bp, Artificial Sequence
  Synthetic Polynucleotide
atggccttaccagtgaccgccttgctcctgccgctggccttgctgctccacgccgccaggccgcagctccagctgcaagagtctggacctggcctggtcaagcctagcgagacactgagcctgacctgtaccgtgtccggcgatagcatcagcagcggcgattactactggggctggatcagacagcctcctggcaaaggactggaatggatcggccacatctactacagcggcgtgacctactacaaccccagcctgaagtccagagtgaccatcagcgtggacaccagccggaaccagttctccctgaagctgtctagcgtgacagccgccgataccgccgtgtactactgcaccagagaggacagcagcaactggcggagtagaggccagggaacactggtcacagttagctctctcgagagcggcggaggcggatctttcgaagtgcagctgcttgaaagtggcggcggactgattcagcctggcggatctctgagactgagctgtgccgccagcggcttcaccttttctagccacgccatgacctgggtccgacaggcacctggaaaagggcttgaatgggtgtccgccatcagcggctctggcgattacacacactacgccgacagcgtgaagggcagattcaccatcagcagagacaacagcaagaacaccgtgtacctccagatgaacagcctgagagccgaggacagcgccgtgtattattgcgccaaggatgaggatggcggcagcctgcttggacacagaggacaaggcaccctggtcaccgtttcttccacgcgtaccacgacgccagcgccgcgaccaccaacaccggcgcccaccatcgcgtcgcagcccctgtccctgcgcccagaggcgtgccggccagcggcggggggcgcagtgcacacgagggggctggacttcgcctgtgacatctacatctgggcgcccttggccgggacttgtggggtccttctcctgtcactggttatcaccctttactgcaaacggggcagaaagaaactcctgtatatattcaaacaaccatttatgagaccagtacaaactactcaagaggaagatggctgtagctgccgatttccagaagaagaagaaggaggatgtgaactgagagtgaagttcagcaggagcgcagacgcccccgcgtaccagcagggccagaaccagctctataacgagctgaatctaggacgaagagaggagtacgatgttttggacaagagacgtggccgggaccctgagatggggggaaagccgagaaggaagaaccctcaggaaggcctgtacaatgaactgcagaaagataagatggcggaggcctacagtgagattgggatgaaaggcgagcgccggaggggcaaggggcacgatggcctttaccagggtctcagtacagccaccaaggacacctacgacgcccttcacatgcaggccctgccccctcgctaa

SEQ ID NO: 21912 - DNA, 1479 bp, Artificial Sequence
  Synthetic Polynucleotide
atggccttaccagtgaccgccttgctcctgccgctggccttgctgctccacgccgccaggccggaggtgcagctggttgaatctggcggaggactggttcagcctggcggatctctgagactgtcctgcacattttccggcggcaccttcagcagctacacaatgggctggttcagacaggcccctggcaaagaacgggaatttgtggccgaagtccgatggggcggagtgaccacatacagcaacagcctgaaggacagattcagcatcagcgaggacagcgtgaagaacgccgtgtacctccagatgaactccctgaagcctgaggacacagccgtgtactattgtgccgctgtgcggcagatgtacatgaccgtggtgcctgattattggggccagggcacactggtcacagtgtctagcagcggcggaggcggatctttcgaacagctccagttgcaagagagcggccctggcttggtaaaaccttccgagacccttagcctcacatgcacggttagtgggggcagcatttcctcaggtgattactattggggatggattcggcaacccccgggtaaaggattggagtggattggtcatatttattatagtggagcgacgtactacaacccaagtctcaaatccagggttacaatatccgtcgatacgagcaggaaccaattcagcttgaaactttctagtgtcaccgcagcagacacagccgtctattactgtacgcgggatgactccagtaattggcggtcccgagggcaagggacactggtcacggtctcctcaacgcgtaccacgacgccagcgccgcgaccaccaacaccggcgcccaccatcgcgtcgcagcccctgtccctgcgcccagaggcgtgccggccagcggcggggggcgcagtgcacacgagggggctggacttcgcctgtgacatctacatctgggcgcccttggccgggacttgtggggtccttctcctgtcactggttatcaccctttactgcaaacggggcagaaagaaactcctgtatatattcaaacaaccatttatgagaccagtacaaactactcaagaggaagatggctgtagctgccgatttccagaagaagaagaaggaggatgtgaactgagagtgaagttcagcaggagcgcagacgcccccgcgtaccagcagggccagaaccagctctataacgagctgaatctaggacgaagagaggagtacgatgttttggacaagagacgtggccgggaccctgagatggggggaaagccgagaaggaagaaccctcaggaaggcctgtacaatgaactgcagaaagataagatggcggaggcctacagtgagattgggatgaaaggcgagcgccggaggggcaaggggcacgatggcctttaccagggtctcagtacagccaccaaggacacctacgacgcccttcacatgcaggccctgccccctcgctaa

SEQ ID NO: 21913 - DNA, 1098 bp, Artificial Sequence
  Synthetic Polynucleotide
atggccttaccagtgaccgccttgctcctgccgctggccttgctgctccacgccgccaggccggaggtgcagctggttgaatctggcggaggactggttcagcctggcggatctctgagactgtcttgtgccgccagcggcttcaacatcaaggatacctgtatcggctgggttcgcagagcccctggcaaagaggaagaactggtcgccaaaatctgcaagtacagcggccacaccagatacgccgacagcgtgaagggcagattcaccatcagcgccgacaccagcaagaacaccgcctacctccagatgaacagcctgagagccgaggacaccgccgtgtactattgtgccgctgtgtccgtcagagatgggcactacaattactggggccagggcaccaccgtgaccgtttcttcaacgcgtaccacgacgccagcgccgcgaccaccaacaccggcgcccaccatcgcgtcgcagcccctgtccctgcgcccagaggcgtgccggccagcggcggggggcgcagtgcacacgagggggctggacttcgcctgtgacatctacatctgggcgcccttggccgggacttgtggggtccttctcctgtcactggttatcaccctttactgcaaacggggcagaaagaaactcctgtatatattcaaacaaccatttatgagaccagtacaaactactcaagaggaagatggctgtagctgccgatttccagaagaagaagaaggaggatgtgaactgagagtgaagttcagcaggagcgcagacgcccccgcgtaccagcagggccagaaccagctctataacgagctgaatctaggacgaagagaggagtacgatgttttggacaagagacgtggccgggaccctgagatggggggaaagccgagaaggaagaaccctcaggaaggcctgtacaatgaactgcagaaagataagatggcggaggcctacagtgagattgggatgaaaggcgagcgccggaggggcaaggggcacgatggcctttaccagggtctcagtacagccaccaaggacacctacgacgcccttcacatgcaggccctgccccctcgctaa

SEQ ID NO: 21914 - DNA, 2187 bp, Artificial Sequence; identical to SEQ ID NO: 6829
  Synthetic Polynucleotide

SEQ ID NO: 21915 - DNA, 2187 bp, Artificial Sequence
  Synthetic Polynucleotide
atggccttaccagtgaccgccttgctcctgccgctggccttgctgctccacgccgccaggccgcagctccagctgcaagagtctggacctggcctggtcaagcctagcgagacactgagcctgacctgtaccgtgtccggcgatagcatcagcagcggcgattactactggggctggatcagacagcctcctggcaaaggactggaatggatcggccacatctactacagcggcgtgacctactacaaccccagcctgaagtccagagtgaccatcagcgtggacaccagccggaaccagttctccctgaagctgtctagcgtgacagccgccgataccgccgtgtactactgcaccagagaggacagcagcaactggcggagtagaggccagggaacactggtcacagttagctctctcgagagcggcggaggcggatctttcgaacagctccagttgcaagagagcggccctggcttggtaaaaccttccgagacccttagcctcacatgcacggttagtgggggcagcatttcctcaggtgattactattggggatggattcggcaacccccgggtaaaggattggagtggattggtcatatttattatagtggagcgacgtactacaacccaagtctcaaatccagggttacaatatccgtcgatacgagcaggaaccaattcagcttgaaactttctagtgtcaccgcagcagacacagccgtctattactgtacgcgggatgactccagtaattggcggtcccgagggcaagggacactggtcacggtctcctcaacgcgtgagcagaaactgatctcggaagaggatctggcgaagcccaccacgacgccagcgccgcgaccaccaacaccggcgcccaccatcgcgtcgcagcccctgtccctgcgcccagaggcgtgccggccagcggcggggggcgcagtgcacacgagggggctggacttcgcctgtgacatctacatctgggcgcccttggccgggacttgtggggtccttctcctgtcactggttatcaccctttactgcaaacggggcagaaagaaactcctgtatatattcaaacaaccatttatgagaccagtacaaactactcaagaggaagatggctgtagctgccgatttccagaagaagaagaaggaggatgtgaactgagagtgaagttcagcaggagcgcagacgcccccgcgtaccagcagggccagaaccagctctataacgagctgaatctaggacgaagagaggagtacgatgttttggacaagagacgtggccgggaccctgagatggggggaaagccgagaaggaagaaccctcaggaaggcctgtacaatgaactgcagaaagataagatggcggaggcctacagtgagattgggatgaaaggcgagcgccggaggggcaaggggcacgatggcctttaccagggtctcagtacagccaccaaggacacctacgacgcccttcacatgcaggccctgccccctcgctctagtggctccggcgagggcagaggaagtctactaacctgcggagatgtggaagaaaatcctggcccacatatgaccgagtacaagcccacggtgcgcctcgccacccgcgacgacgtccccagggccgtacgcaccctcgccgccgcgttcgccgactaccccgccacgcgccacaccgtcgatccggaccgccacatcgagcgggtcaccgagctgcaagaactcttcctcacgcgcgtcgggctcgacatcggcaaggtgtgggtcgcggacgacggcgccgcggtggcggtctggaccacgccggagagcgtcgaagcgggggcggtgttcgccgagatcggcccgcgcatggccgagttgagcggttcccggctggccgcgcagcaacagatggaaggcctcctggcgccgcaccggcccaaggagcccgcgtggttcctggccaccgtcggcgtctcgcccgaccaccagggcaagggtctgggcagcgccgtcgtgctccccggagtggaggcggccgagcgcgccggggtgcccgccttcctggagacctccgcgccccgcaacctccccttctacgagcggctcggcttcaccgtcaccgccgacgtcgaggtgcccgaaggaccgcgcacctggtgcatgacccgcaagcccggtgcctga

SEQ ID NO: 21916 - DNA, 2169 bp, Artificial Sequence; identical to SEQ ID NO: 6537
  Synthetic Polynucleotide

SEQ ID NO: 21917 - DNA, 2211 bp, Artificial Sequence; identical to SEQ ID NO: 6464
  Synthetic Polynucleotide

SEQ ID NO: 21918 - DNA, 2172 bp, Artificial Sequence
  Synthetic Polynucleotide
atggccttaccagtgaccgccttgctcctgccgctggccttgctgctccacgccgccaggccgcagctccagctgcaagagtctggacctggcctggtcaagcctagcgagacactgagcctgacctgtaccgtgtccggcgatagcatcagcagcggcgattactactggggctggatcagacagcctcctggcaaaggactggaatggatcggccacatctactacagcggcgtgacctactacaaccccagcctgaagtccagagtgaccatcagcgtggacaccagccggaaccagttctccctgaagctgtctagcgtgacagccgccgataccgccgtgtactactgcaccagagaggacagcagcaactggcggagtagaggccagggaacactggtcacagttagctctctcgagagcggcggaggcggatctttcgaagaggttcagctgcttgagtctggcggaggactggttcaacctggcggaagcctgagactgtcttgtgccgcttccggcttcagcttcagcagctatgccctgagctgggtccgacaggctcctggcaaaggactggaatgggtgtccagcatcggcgagaatgacggcaccaccgattatgccgatgccgtgaagggcagattcaccatctctcgggacaacagcaagaacaccctgtacctccagatgaacagcctcagagtggaagataccgccgtgtactactgcgtgaaggacggcgttcactggggccagggaacactggttacagtgtctagcacgcgtgagcagaaactgatctcggaagaggatctggcgaagcccaccacgacgccagcgccgcgaccaccaacaccggcgcccaccatcgcgtcgcagcccctgtccctgcgcccagaggcgtgccggccagcggcggggggcgcagtgcacacgagggggctggacttcgcctgtgacatctacatctgggcgcccttggccgggacttgtggggtccttctcctgtcactggttatcaccctttactgcaaacggggcagaaagaaactcctgtatatattcaaacaaccatttatgagaccagtacaaactactcaagaggaagatggctgtagctgccgatttccagaagaagaagaaggaggatgtgaactgagagtgaagttcagcaggagcgcagacgcccccgcgtaccagcagggccagaaccagctctataacgagctgaatctaggacgaagagaggagtacgatgttttggacaagagacgtggccgggaccctgagatggggggaaagccgagaaggaagaaccctcaggaaggcctgtacaatgaactgcagaaagataagatggcggaggcctacagtgagattgggatgaaaggcgagcgccggaggggcaaggggcacgatggcctttaccagggtctcagtacagccaccaaggacacctacgacgcccttcacatgcaggccctgccccctcgctctagtggctccggcgagggcagaggaagtctactaacctgcggagatgtggaagaaaatcctggcccacatatgaccgagtacaagcccacggtgcgcctcgccacccgcgacgacgtccccagggccgtacgcaccctcgccgccgcgttcgccgactaccccgccacgcgccacaccgtcgatccggaccgccacatcgagcgggtcaccgagctgcaagaactcttcctcacgcgcgtcgggctcgacatcggcaaggtgtgggtcgcggacgacggcgccgcggtggcggtctggaccacgccggagagcgtcgaagcgggggcggtgttcgccgagatcggcccgcgcatggccgagttgagcggttcccggctggccgcgcagcaacagatggaaggcctcctggcgccgcaccggcccaaggagcccgcgtggttcctggccaccgtcggcgtctcgcccgaccaccagggcaagggtctgggcagcgccgtcgtgctccccggagtggaggcggccgagcgcgccggggtgcccgccttcctggagacctccgcgccccgcaacctccccttctacgagcggctcggcttcaccgtcaccgccgacgtcgaggtgcccgaaggaccgcgcacctggtgcatgacccgcaagcccggtgcctga

SEQ ID NO: 21919 - DNA, 2190 bp, Artificial Sequence; identical to SEQ ID NO: 6902
  Synthetic Polynucleotide

SEQ ID NO: 21920 - DNA, 2193 bp, Artificial Sequence
  Synthetic Polynucleotide
atggccttaccagtgaccgccttgctcctgccgctggccttgctgctccacgccgccaggccggaggtgcagctggttgaatctggcggaggactggttcagcctggcggatctctgagactgtcctgcacattttccggcggcaccttcagcagctacacaatgggctggttcagacaggcccctggcaaagaacgggaatttgtggccgaagtccgatggggcggagtgaccacatacagcaacagcctgaaggacagattcagcatcagcgaggacagcgtgaagaacgccgtgtacctccagatgaactccctgaagcctgaggacacagccgtgtactattgtgccgctgtgcggcagatgtacatgaccgtggtgcctgattattggggccagggcacactggtcacagtgtctagcctcgagagcggcggaggcggatctttcgaagtgcagctgcttgaaagtggcggcggactgattcagcctggcggatctctgagactgagctgtgccgccagcggcttcaccttttctagccacgccatgacctgggtccgacaggcacctggaaaagggcttgaatgggtgtccgccatcagcggctctggcgattacacacactacgccgacagcgtgaagggcagattcaccatcagcagagacaacagcaagaacaccgtgtacctccagatgaacagcctgagagccgaggacagcgccgtgtattattgcgccaaggatgaggatggcggcagcctgcttggacacagaggacaaggcaccctggtcaccgtttcttccacgcgtgagcagaaactgatctcggaagaggatctggcgaagcccaccacgacgccagcgccgcgaccaccaacaccggcgcccaccatcgcgtcgcagcccctgtccctgcgcccagaggcgtgccggccagcggcggggggcgcagtgcacacgagggggctggacttcgcctgtgacatctacatctgggcgcccttggccgggacttgtggggtccttctcctgtcactggttatcaccctttactgcaaacggggcagaaagaaactcctgtatatattcaaacaaccatttatgagaccagtacaaactactcaagaggaagatggctgtagctgccgatttccagaagaagaagaaggaggatgtgaactgagagtgaagttcagcaggagcgcagacgcccccgcgtaccagcagggccagaaccagctctataacgagctgaatctaggacgaagagaggagtacgatgttttggacaagagacgtggccgggaccctgagatggggggaaagccgagaaggaagaaccctcaggaaggcctgtacaatgaactgcagaaagataagatggcggaggcctacagtgagattgggatgaaaggcgagcgccggaggggcaaggggcacgatggcctttaccagggtctcagtacagccaccaaggacacctacgacgcccttcacatgcaggccctgccccctcgctctagtggctccggcgagggcagaggaagtctactaacctgcggagatgtggaagaaaatcctggcccacatatgaccgagtacaagcccacggtgcgcctcgccacccgcgacgacgtccccagggccgtacgcaccctcgccgccgcgttcgccgactaccccgccacgcgccacaccgtcgatccggaccgccacatcgagcgggtcaccgagctgcaagaactcttcctcacgcgcgtcgggctcgacatcggcaaggtgtgggtcgcggacgacggcgccgcggtggcggtctggaccacgccggagagcgtcgaagcgggggcggtgttcgccgagatcggcccgcgcatggccgagttgagcggttcccggctggccgcgcagcaacagatggaaggcctcctggcgccgcaccggcccaaggagcccgcgtggttcctggccaccgtcggcgtctcgcccgaccaccagggcaagggtctgggcagcgccgtcgtgctccccggagtggaggcggccgagcgcgccggggtgcccgccttcctggagacctccgcgccccgcaacctccccttctacgagcggctcggcttcaccgtcaccgccgacgtcgaggtgcccgaaggaccgcgcacctggtgcatgacccgcaagcccggtgcctga

SEQ ID NO: 21921 - DNA, 2214 bp, Artificial Sequence
  Synthetic Polynucleotide
atggccttaccagtgaccgccttgctcctgccgctggccttgctgctccacgccgccaggccggaggtgcagctggttgaatctggtggcggagttgtgcagcctggcagaagcctgagactgtcttgtgccgccagcggctttagcttcagcggctatggaatgcactgggtccgacaggcccctggcaaaggacttgagtgggtcgcctacatcagctacgacggcagcaacaagtattacgccgacagcgtgaagggcagattcaccatcagccgggacaacagcaagaacaccctgtacctccagatgaacagcctgagagccgaggacaccgccgtgtactactgcgccaaagatcctgcctggggactgagactgggcgagagcagcagctacgatttcgacatctggggccagggcacaatggtcacagtttctagcctcgagagcggcggaggcggatctttcgaagtgcagctgcttgaaagtggcggcggactgattcagcctggcggatctctgagactgagctgtgccgccagcggcttcaccttttctagccacgccatgacctgggtccgacaggcacctggaaaagggcttgaatgggtgtccgccatcagcggctctggcgattacacacactacgccgacagcgtgaagggcagattcaccatcagcagagacaacagcaagaacaccgtgtacctccagatgaacagcctgagagccgaggacagcgccgtgtattattgcgccaaggatgaggatggcggcagcctgcttggacacagaggacaaggcaccctggtcaccgtttcttccacgcgtgagcagaaactgatctcggaagaggatctggcgaagcccaccacgacgccagcgccgcgaccaccaacaccggcgcccaccatcgcgtcgcagcccctgtccctgcgcccagaggcgtgccggccagcggcggggggcgcagtgcacacgagggggctggacttcgcctgtgacatctacatctgggcgcccttggccgggacttgtggggtccttctcctgtcactggttatcaccctttactgcaaacggggcagaaagaaactcctgtatatattcaaacaaccatttatgagaccagtacaaactactcaagaggaagatggctgtagctgccgatttccagaagaagaagaaggaggatgtgaactgagagtgaagttcagcaggagcgcagacgcccccgcgtaccagcagggccagaaccagctctataacgagctgaatctaggacgaagagaggagtacgatgttttggacaagagacgtggccgggaccctgagatggggggaaagccgagaaggaagaaccctcaggaaggcctgtacaatgaactgcagaaagataagatggcggaggcctacagtgagattgggatgaaaggcgagcgccggaggggcaaggggcacgatggcctttaccagggtctcagtacagccaccaaggacacctacgacgcccttcacatgcaggccctgccccctcgctctagtggctccggcgagggcagaggaagtctactaacctgcggagatgtggaagaaaatcctggcccacatatgaccgagtacaagcccacggtgcgcctcgccacccgcgacgacgtccccagggccgtacgcaccctcgccgccgcgttcgccgactaccccgccacgcgccacaccgtcgatccggaccgccacatcgagcgggtcaccgagctgcaagaactcttcctcacgcgcgtcgggctcgacatcggcaaggtgtgggtcgcggacgacggcgccgcggtggcggtctggaccacgccggagagcgtcgaagcgggggcggtgttcgccgagatcggcccgcgcatggccgagttgagcggttcccggctggccgcgcagcaacagatggaaggcctcctggcgccgcaccggcccaaggagcccgcgtggttcctggccaccgtcggcgtctcgcccgaccaccagggcaagggtctgggcagcgccgtcgtgctccccggagtggaggcggccgagcgcgccggggtgcccgccttcctggagacctccgcgccccgcaacctccccttctacgagcggctcggcttcaccgtcaccgccgacgtcgaggtgcccgaaggaccgcgcacctggtgcatgacccgcaagcccggtgcctga

SEQ ID NO: 21922 - DNA, 2166 bp, Artificial Sequence
  Synthetic Polynucleotide
atggactggatttggcgcatccttttccttgtcggcgctgctaccggcgcccattccgaggttcagctgcttgagtctggcggaggactggttcaacctggcggaagcctgagactgtcttgtgccgcttccggcttcagcttcagcagctatgccctgagctgggtccgacaggctcctggcaaaggactggaatgggtgtccagcatcggcgagaatgacggcaccaccgattatgccgatgccgtgaagggcagattcaccatctctcgggacaacagcaagaacaccctgtacctccagatgaacagcctcagagtggaagataccgccgtgtactactgcgtgaaggacggcgttcactggggccagggaacactggttacagtgtctagcctcgagagcggcggaggcggatctttcgaagtgcagctgcttgaaagtggcggcggactgattcagcctggcggatctctgagactgagctgtgccgccagcggcttcaccttttctagccacgccatgacctgggtccgacaggcacctggaaaagggcttgaatgggtgtccgccatcagcggctctggcgattacacacactacgccgacagcgtgaagggcagattcaccatcagcagagacaacagcaagaacaccgtgtacctccagatgaacagcctgagagccgaggacagcgccgtgtattattgcgccaaggatgaggatggcggcagcctgcttggacacagaggacaaggcaccctggtcaccgtttcttccacgcgtgagcagaaactgatctcggaagaggatctggcgaagcccaccacgacgccagcgccgcgaccaccaacaccggcgcccaccatcgcgtcgcagcccctgtccctgcgcccagaggcgtgccggccagcggcggggggcgcagtgcacacgagggggctggacttcgcctgtgacatctacatctgggcgcccttggccgggacttgtggggtccttctcctgtcactggttatcaccctttactgcaaacggggcagaaagaaactcctgtatatattcaaacaaccatttatgagaccagtacaaactactcaagaggaagatggctgtagctgccgatttccagaagaagaagaaggaggatgtgaactgagagtgaagttcagcaggagcgcagacgcccccgcgtaccagcagggccagaaccagctctataacgagctgaatctaggacgaagagaggagtacgatgttttggacaagagacgtggccgggaccctgagatggggggaaagccgagaaggaagaaccctcaggaaggcctgtacaatgaactgcagaaagataagatggcggaggcctacagtgagattgggatgaaaggcgagcgccggaggggcaaggggcacgatggcctttaccagggtctcagtacagccaccaaggacacctacgacgcccttcacatgcaggccctgccccctcgctctagtggctccggcgagggcagaggaagtctactaacctgcggagatgtggaagaaaatcctggcccacatatgaccgagtacaagcccacggtgcgcctcgccacccgcgacgacgtccccagggccgtacgcaccctcgccgccgcgttcgccgactaccccgccacgcgccacaccgtcgatccggaccgccacatcgagcgggtcaccgagctgcaagaactcttcctcacgcgcgtcgggctcgacatcggcaaggtgtgggtcgcggacgacggcgccgcggtggcggtctggaccacgccggagagcgtcgaagcgggggcggtgttcgccgagatcggcccgcgcatggccgagttgagcggttcccggctggccgcgcagcaacagatggaaggcctcctggcgccgcaccggcccaaggagcccgcgtggttcctggccaccgtcggcgtctcgcccgaccaccagggcaagggtctgggcagcgccgtcgtgctccccggagtggaggcggccgagcgcgccggggtgcccgccttcctggagacctccgcgccccgcaacctccccttctacgagcggctcggcttcaccgtcaccgccgacgtcgaggtgcccgaaggaccgcgcacctggtgcatgacccgcaagcccggtgcctga

SEQ ID NO: 21923 - DNA, 1803 bp, Artificial Sequence
  Synthetic Polynucleotide
atggccttaccagtgaccgccttgctcctgccgctggccttgctgctccacgccgccaggccgcaggtgcagctggttgaatctggcggaggactggttcagcctggcggatctctgagactgtcttgtgccgccagcggcttcaccttcaccaatcacgccatgagctgggtccgacaggcccctggaaaaggactggaactggtgtctagcatcagcggcaacggcagaaccacctactacgccgatagcgtgaagggcagattcaccatcagccgggacatcagcaagaacaccctggacctccagatgaacagcctgagagccgaggataccgccgtgtactactgtgccaaggatggcggagagacactggtggatagcagaggccagggcacactggtcacagtgtcatctacgcgtgagcagaaactgatctcggaagaggatctggcgaagcccaccacgacgccagcgccgcgaccaccaacaccggcgcccaccatcgcgtcgcagcccctgtccctgcgcccagaggcgtgccggccagcggcggggggcgcagtgcacacgagggggctggacttcgcctgtgacatctacatctgggcgcccttggccgggacttgtggggtccttctcctgtcactggttatcaccctttactgcaaacggggcagaaagaaactcctgtatatattcaaacaaccatttatgagaccagtacaaactactcaagaggaagatggctgtagctgccgatttccagaagaagaagaaggaggatgtgaactgagagtgaagttcagcaggagcgcagacgcccccgcgtaccagcagggccagaaccagctctataacgagctgaatctaggacgaagagaggagtacgatgttttggacaagagacgtggccgggaccctgagatggggggaaagccgagaaggaagaaccctcaggaaggcctgtacaatgaactgcagaaagataagatggcggaggcctacagtgagattgggatgaaaggcgagcgccggaggggcaaggggcacgatggcctttaccagggtctcagtacagccaccaaggacacctacgacgcccttcacatgcaggccctgccccctcgctctagtggctccggcgagggcagaggaagtctactaacctgcggagatgtggaagaaaatcctggcccacatatgaccgagtacaagcccacggtgcgcctcgccacccgcgacgacgtccccagggccgtacgcaccctcgccgccgcgttcgccgactaccccgccacgcgccacaccgtcgatccggaccgccacatcgagcgggtcaccgagctgcaagaactcttcctcacgcgcgtcgggctcgacatcggcaaggtgtgggtcgcggacgacggcgccgcggtggcggtctggaccacgccggagagcgtcgaagcgggggcggtgttcgccgagatcggcccgcgcatggccgagttgagcggttcccggctggccgcgcagcaacagatggaaggcctcctggcgccgcaccggcccaaggagcccgcgtggttcctggccaccgtcggcgtctcgcccgaccaccagggcaagggtctgggcagcgccgtcgtgctccccggagtggaggcggccgagcgcgccggggtgcccgccttcctggagacctccgcgccccgcaacctccccttctacgagcggctcggcttcaccgtcaccgccgacgtcgaggtgcccgaaggaccgcgcacctggtgcatgacccgcaagcccggtgcctga

SEQ ID NO: 21924 - DNA, 1809 bp, Artificial Sequence
  Synthetic Polynucleotide
atggccttaccagtgaccgccttgctcctgccgctggccttgctgctccacgccgccaggccggaggtgcagctggttgaatctggcggaggactggttcagcctggcggatctctgagactgtcctgcacattttccggcggcaccttcagcagctacacaatgggctggttcagacaggcccctggcaaagaacgggaatttgtggccgaagtccgatggggcggagtgaccacatacagcaacagcctgaaggacagattcagcatcagcgaggacagcgtgaagaacgccgtgtacctccagatgaactccctgaagcctgaggacacagccgtgtactattgtgccgctgtgcggcagatgtacatgaccgtggtgcctgattattggggccagggcacactggtcacagtgtctagcacgcgtgagcagaaactgatctcggaagaggatctggcgaagcccaccacgacgccagcgccgcgaccaccaacaccggcgcccaccatcgcgtcgcagcccctgtccctgcgcccagaggcgtgccggccagcggcggggggcgcagtgcacacgagggggctggacttcgcctgtgacatctacatctgggcgcccttggccgggacttgtggggtccttctcctgtcactggttatcaccctttactgcaaacggggcagaaagaaactcctgtatatattcaaacaaccatttatgagaccagtacaaactactcaagaggaagatggctgtagctgccgatttccagaagaagaagaaggaggatgtgaactgagagtgaagttcagcaggagcgcagacgcccccgcgtaccagcagggccagaaccagctctataacgagctgaatctaggacgaagagaggagtacgatgttttggacaagagacgtggccgggaccctgagatggggggaaagccgagaaggaagaaccctcaggaaggcctgtacaatgaactgcagaaagataagatggcggaggcctacagtgagattgggatgaaaggcgagcgccggaggggcaaggggcacgatggcctttaccagggtctcagtacagccaccaaggacacctacgacgcccttcacatgcaggccctgccccctcgctctagtggctccggcgagggcagaggaagtctactaacctgcggagatgtggaagaaaatcctggcccacatatgaccgagtacaagcccacggtgcgcctcgccacccgcgacgacgtccccagggccgtacgcaccctcgccgccgcgttcgccgactaccccgccacgcgccacaccgtcgatccggaccgccacatcgagcgggtcaccgagctgcaagaactcttcctcacgcgcgtcgggctcgacatcggcaaggtgtgggtcgcggacgacggcgccgcggtggcggtctggaccacgccggagagcgtcgaagcgggggcggtgttcgccgagatcggcccgcgcatggccgagttgagcggttcccggctggccgcgcagcaacagatggaaggcctcctggcgccgcaccggcccaaggagcccgcgtggttcctggccaccgtcggcgtctcgcccgaccaccagggcaagggtctgggcagcgccgtcgtgctccccggagtggaggcggccgagcgcgccggggtgcccgccttcctggagacctccgcgccccgcaacctccccttctacgagcggctcggcttcaccgtcaccgccgacgtcgaggtgcccgaaggaccgcgcacctggtgcatgacccgcaagcccggtgcctga

SEQ ID NO: 21925 - DNA, 1830 bp, Artificial Sequence
  Synthetic Polynucleotide
atggccttaccagtgaccgccttgctcctgccgctggccttgctgctccacgccgccaggccggaggtgcagctggttgaatctggtggcggagttgtgcagcctggcagaagcctgagactgtcttgtgccgccagcggctttagcttcagcggctatggaatgcactgggtccgacaggcccctggcaaaggacttgagtgggtcgcctacatcagctacgacggcagcaacaagtattacgccgacagcgtgaagggcagattcaccatcagccgggacaacagcaagaacaccctgtacctccagatgaacagcctgagagccgaggacaccgccgtgtactactgcgccaaagatcctgcctggggactgagactgggcgagagcagcagctacgatttcgacatctggggccagggcacaatggtcacagtttctagcacgcgtgagcagaaactgatctcggaagaggatctggcgaagcccaccacgacgccagcgccgcgaccaccaacaccggcgcccaccatcgcgtcgcagcccctgtccctgcgcccagaggcgtgccggccagcggcggggggcgcagtgcacacgagggggctggacttcgcctgtgacatctacatctgggcgcccttggccgggacttgtggggtccttctcctgtcactggttatcaccctttactgcaaacggggcagaaagaaactcctgtatatattcaaacaaccatttatgagaccagtacaaactactcaagaggaagatggctgtagctgccgatttccagaagaagaagaaggaggatgtgaactgagagtgaagttcagcaggagcgcagacgcccccgcgtaccagcagggccagaaccagctctataacgagctgaatctaggacgaagagaggagtacgatgttttggacaagagacgtggccgggaccctgagatggggggaaagccgagaaggaagaaccctcaggaaggcctgtacaatgaactgcagaaagataagatggcggaggcctacagtgagattgggatgaaaggcgagcgccggaggggcaaggggcacgatggcctttaccagggtctcagtacagccaccaaggacacctacgacgcccttcacatgcaggccctgccccctcgctctagtggctccggcgagggcagaggaagtctactaacctgcggagatgtggaagaaaatcctggcccacatatgaccgagtacaagcccacggtgcgcctcgccacccgcgacgacgtccccagggccgtacgcaccctcgccgccgcgttcgccgactaccccgccacgcgccacaccgtcgatccggaccgccacatcgagcgggtcaccgagctgcaagaactcttcctcacgcgcgtcgggctcgacatcggcaaggtgtgggtcgcggacgacggcgccgcggtggcggtctggaccacgccggagagcgtcgaagcgggggcggtgttcgccgagatcggcccgcgcatggccgagttgagcggttcccggctggccgcgcagcaacagatggaaggcctcctggcgccgcaccggcccaaggagcccgcgtggttcctggccaccgtcggcgtctcgcccgaccaccagggcaagggtctgggcagcgccgtcgtgctccccggagtggaggcggccgagcgcgccggggtgcccgccttcctggagacctccgcgccccgcaacctccccttctacgagcggctcggcttcaccgtcaccgccgacgtcgaggtgcccgaaggaccgcgcacctggtgcatgacccgcaagcccggtgcctga

SEQ ID NO: 21926 - DNA, 2157 bp, Artificial Sequence
  Synthetic Polynucleotide
atggccttaccagtgaccgccttgctcctgccgctggccttgctgctccacgccgccaggccgcagctccagctgcaagagtctggacctggcctggtcaagcctagcgagacactgagcctgacctgtaccgtgtccggcgatagcatcagcagcggcgattactactggggctggatcagacagcctcctggcaaaggactggaatggatcggccacatctactacagcggcgtgacctactacaaccccagcctgaagtccagagtgaccatcagcgtggacaccagccggaaccagttctccctgaagctgtctagcgtgacagccgccgataccgccgtgtactactgcaccagagaggacagcagcaactggcggagtagaggccagggaacactggtcacagttagctctctcgagagcggcggaggcggatctttcgaagaggttcagctgcttgagtctggcggaggactggttcaacctggcggaagcctgagactgtcttgtgccgccagcggcttcacctttagcagctacgccatgagctgggtccgacaggctcctggcaaaggactggaatgggtgtccagcatcagcggcagcggcgactacatctactacgccgatagcgtgaagggcagattcaccatcagccgggacatcagcaagaacaccctgtacctccagatgaacagcctgagagccgaggacaccgccgtgtactactgtgccaaagaaggcaccggcgctaacagcagcctggccgattatagaggccagggcacactggtcaccgtgtctagtacgcgtaccacgacgccagcgccgcgaccaccaacaccggcgcccaccatcgcgtcgcagcccctgtccctgcgcccagaggcgtgccggccagcggcggggggcgcagtgcacacgagggggctggacttcgcctgtgacatctacatctgggcgcccttggccgggacttgtggggtccttctcctgtcactggttatcaccctttactgcaaacggggcagaaagaaactcctgtatatattcaaacaaccatttatgagaccagtacaaactactcaagaggaagatggctgtagctgccgatttccagaagaagaagaaggaggatgtgaactgagagtgaagttcagcaggagcgcagacgcccccgcgtaccagcagggccagaaccagctctataacgagctgaatctaggacgaagagaggagtacgatgttttggacaagagacgtggccgggaccctgagatggggggaaagccgagaaggaagaaccctcaggaaggcctgtacaatgaactgcagaaagataagatggcggaggcctacagtgagattgggatgaaaggcgagcgccggaggggcaaggggcacgatggcctttaccagggtctcagtacagccaccaaggacacctacgacgcccttcacatgcaggccctgccccctcgctctagtggctccggcgagggcagaggaagtctactaacctgcggagatgtggaagaaaatcctggcccacatatgaccgagtacaagcccacggtgcgcctcgccacccgcgacgacgtccccagggccgtacgcaccctcgccgccgcgttcgccgactaccccgccacgcgccacaccgtcgatccggaccgccacatcgagcgggtcaccgagctgcaagaactcttcctcacgcgcgtcgggctcgacatcggcaaggtgtgggtcgcggacgacggcgccgcggtggcggtctggaccacgccggagagcgtcgaagcgggggcggtgttcgccgagatcggcccgcgcatggccgagttgagcggttcccggctggccgcgcagcaacagatggaaggcctcctggcgccgcaccggcccaaggagcccgcgtggttcctggccaccgtcggcgtctcgcccgaccaccagggcaagggtctgggcagcgccgtcgtgctccccggagtggaggcggccgagcgcgccggggtgcccgccttcctggagacctccgcgccccgcaacctccccttctacgagcggctcggcttcaccgtcaccgccgacgtcgaggtgcccgaaggaccgcgcacctggtgcatgacccgcaagcccggtgcctga

SEQ ID NO: 21927 - DNA, 1806 bp, Artificial Sequence
  Synthetic Polynucleotide
atggccttaccagtgaccgccttgctcctgccgctggccttgctgctccacgccgccaggccggaggtgcagctggttgaatctggcggaggactggttcagcctggcggatctctgagactgtcttgtgccgccagcggcttcaacatcaaggatacctgtatcggctgggttcgcagagcccctggcaaagaggaagaactggtcgccaaaatctgcaagtacagcggccacaccagatacgccgacagcgtgaagggcagattcaccatcagcgccgacaccagcaagaacaccgcctacctccagatgaacagcctgagagccgaggacaccgccgtgtactattgtgccgctgtgtccgtcagagatgggcactacaattactggggccagggcaccaccgtgaccgtttcttcaacgcgtgagcagaaactgatctcggaagaggatctggcgaagcccaccacgacgccagcgccgcgaccaccaacaccggcgcccaccatcgcgtcgcagcccctgtccctgcgcccagaggcgtgccggccagcggcggggggcgcagtgcacacgagggggctggacttcgcctgtgacatctacatctgggcgcccttggccgggacttgtggggtccttctcctgtcactggttatcaccctttactgcaaacggggcagaaagaaactcctgtatatattcaaacaaccatttatgagaccagtacaaactactcaagaggaagatggctgtagctgccgatttccagaagaagaagaaggaggatgtgaactgagagtgaagttcagcaggagcgcagacgcccccgcgtaccagcagggccagaaccagctctataacgagctgaatctaggacgaagagaggagtacgatgttttggacaagagacgtggccgggaccctgagatggggggaaagccgagaaggaagaaccctcaggaaggcctgtacaatgaactgcagaaagataagatggcggaggcctacagtgagattgggatgaaaggcgagcgccggaggggcaaggggcacgatggcctttaccagggtctcagtacagccaccaaggacacctacgacgcccttcacatgcaggccctgccccctcgctctagtggctccggcgagggcagaggaagtctactaacctgcggagatgtggaagaaaatcctggcccacatatgaccgagtacaagcccacggtgcgcctcgccacccgcgacgacgtccccagggccgtacgcaccctcgccgccgcgttcgccgactaccccgccacgcgccacaccgtcgatccggaccgccacatcgagcgggtcaccgagctgcaagaactcttcctcacgcgcgtcgggctcgacatcggcaaggtgtgggtcgcggacgacggcgccgcggtggcggtctggaccacgccggagagcgtcgaagcgggggcggtgttcgccgagatcggcccgcgcatggccgagttgagcggttcccggctggccgcgcagcaacagatggaaggcctcctggcgccgcaccggcccaaggagcccgcgtggttcctggccaccgtcggcgtctcgcccgaccaccagggcaagggtctgggcagcgccgtcgtgctccccggagtggaggcggccgagcgcgccggggtgcccgccttcctggagacctccgcgccccgcaacctccccttctacgagcggctcggcttcaccgtcaccgccgacgtcgaggtgcccgaaggaccgcgcacctggtgcatgacccgcaagcccggtgcctga

SEQ ID NO: 21928 - DNA, 2214 bp, Artificial Sequence
  Synthetic Polynucleotide
atggccttaccagtgaccgccttgctcctgccgctggccttgctgctccacgccgccaggccggaggttcagctgcttgagtctggcggaggactggttcaacctggcggaagcctgagactgtcttgtgccgccagcggcttcacctttagcagctacgccatgagctgggtccgacaggctcctggcaaaggactggaatgggtgtccagcatcagcggcagcggcgactacatctactacgccgatagcgtgaagggcagattcaccatcagccgggacatcagcaagaacaccctgtacctccagatgaacagcctgagagccgaggacaccgccgtgtactactgtgccaaagaaggcaccggcgctaacagcagcctggccgattatagaggccagggcacactggtcaccgtgtctagtctcgagagcggcggaggcggatctttcgaacagctgcaactgcaagagtctggccccggactggtcaagccttctgaaacactggccctgacctgcaatgtgtccggcggctctatcagcagcagctcctattactggggctggatcagacagcctccaggcaagagactggaatggatcggcagcatctactacagcggcagcacatacttcaaccccagcctgaagtccagagtgaccatcagcgtggacacctccaagaaccagttctccctgaagctgagcagcgtgacagccgccgatacagccgtgtattactgtgctggcggcgactactatggccccgttggacaatggcccagcgattacagaggacagggaacccttgtgaccgtgtcctctacgcgtgagcagaaactgatctcggaagaggatctggcgaagcccaccacgacgccagcgccgcgaccaccaacaccggcgcccaccatcgcgtcgcagcccctgtccctgcgcccagaggcgtgccggccagcggcggggggcgcagtgcacacgagggggctggacttcgcctgtgacatctacatctgggcgcccttggccgggacttgtggggtccttctcctgtcactggttatcaccctttactgcaaacggggcagaaagaaactcctgtatatattcaaacaaccatttatgagaccagtacaaactactcaagaggaagatggctgtagctgccgatttccagaagaagaagaaggaggatgtgaactgagagtgaagttcagcaggagcgcagacgcccccgcgtaccagcagggccagaaccagctctataacgagctgaatctaggacgaagagaggagtacgatgttttggacaagagacgtggccgggaccctgagatggggggaaagccgagaaggaagaaccctcaggaaggcctgtacaatgaactgcagaaagataagatggcggaggcctacagtgagattgggatgaaaggcgagcgccggaggggcaaggggcacgatggcctttaccagggtctcagtacagccaccaaggacacctacgacgcccttcacatgcaggccctgccccctcgctctagtggctccggcgagggcagaggaagtctactaacctgcggagatgtggaagaaaatcctggcccacatatgaccgagtacaagcccacggtgcgcctcgccacccgcgacgacgtccccagggccgtacgcaccctcgccgccgcgttcgccgactaccccgccacgcgccacaccgtcgatccggaccgccacatcgagcgggtcaccgagctgcaagaactcttcctcacgcgcgtcgggctcgacatcggcaaggtgtgggtcgcggacgacggcgccgcggtggcggtctggaccacgccggagagcgtcgaagcgggggcggtgttcgccgagatcggcccgcgcatggccgagttgagcggttcccggctggccgcgcagcaacagatggaaggcctcctggcgccgcaccggcccaaggagcccgcgtggttcctggccaccgtcggcgtctcgcccgaccaccagggcaagggtctgggcagcgccgtcgtgctccccggagtggaggcggccgagcgcgccggggtgcccgccttcctggagacctccgcgccccgcaacctccccttctacgagcggctcggcttcaccgtcaccgccgacgtcgaggtgcccgaaggaccgcgcacctggtgcatgacccgcaagcccggtgcctga

SEQ ID NO: 21929 - DNA, 2196 bp, Artificial Sequence
  Synthetic Polynucleotide
atggccttaccagtgaccgccttgctcctgccgctggccttgctgctccacgccgccaggccgcaggtgcagctggttgaatctggcggaggactggttcagcctggcggatctctgagactgtcttgtgccgccagcggcttcaccttcaccaatcacgccatgagctgggtccgacaggcccctggaaaaggactggaactggtgtctagcatcagcggcaacggcagaaccacctactacgccgatagcgtgaagggcagattcaccatcagccgggacatcagcaagaacaccctggacctccagatgaacagcctgagagccgaggataccgccgtgtactactgtgccaaggatggcggagagacactggtggatagcagaggccagggcacactggtcacagtgtcatctctcgagagcggcggaggcggatctttcgaagttcagctgcttgagtctggcggaggactggttcaacctggcggaagcctgagactgtcttgtgccgccagcggcttcatcttcagcagctacgccatgagctgggtccgacaggctcctggaaagggccaagaatgggtttccggcgttagcggcacaggcgtgaacacctactacgccgatagcgtgaagggcagattcaccatcagccgggacaacagcaagaacaccctgtacctccagatgaacagcctgagagccgaggacaccgccgtgtactattgtgcctctggcaaaggctgggacagcggctcttggtacgaggactatagaggccagggcaccctggtcacagtttcttcaacgcgtgagcagaaactgatctcggaagaggatctggcgaagcccaccacgacgccagcgccgcgaccaccaacaccggcgcccaccatcgcgtcgcagcccctgtccctgcgcccagaggcgtgccggccagcggcggggggcgcagtgcacacgagggggctggacttcgcctgtgacatctacatctgggcgcccttggccgggacttgtggggtccttctcctgtcactggttatcaccctttactgcaaacggggcagaaagaaactcctgtatatattcaaacaaccatttatgagaccagtacaaactactcaagaggaagatggctgtagctgccgatttccagaagaagaagaaggaggatgtgaactgagagtgaagttcagcaggagcgcagacgcccccgcgtaccagcagggccagaaccagctctataacgagctgaatctaggacgaagagaggagtacgatgttttggacaagagacgtggccgggaccctgagatggggggaaagccgagaaggaagaaccctcaggaaggcctgtacaatgaactgcagaaagataagatggcggaggcctacagtgagattgggatgaaaggcgagcgccggaggggcaaggggcacgatggcctttaccagggtctcagtacagccaccaaggacacctacgacgcccttcacatgcaggccctgccccctcgctctagtggctccggcgagggcagaggaagtctactaacctgcggagatgtggaagaaaatcctggcccacatatgaccgagtacaagcccacggtgcgcctcgccacccgcgacgacgtccccagggccgtacgcaccctcgccgccgcgttcgccgactaccccgccacgcgccacaccgtcgatccggaccgccacatcgagcgggtcaccgagctgcaagaactcttcctcacgcgcgtcgggctcgacatcggcaaggtgtgggtcgcggacgacggcgccgcggtggcggtctggaccacgccggagagcgtcgaagcgggggcggtgttcgccgagatcggcccgcgcatggccgagttgagcggttcccggctggccgcgcagcaacagatggaaggcctcctggcgccgcaccggcccaaggagcccgcgtggttcctggccaccgtcggcgtctcgcccgaccaccagggcaagggtctgggcagcgccgtcgtgctccccggagtggaggcggccgagcgcgccggggtgcccgccttcctggagacctccgcgccccgcaacctccccttctacgagcggctcggcttcaccgtcaccgccgacgtcgaggtgcccgaaggaccgcgcacctggtgcatgacccgcaagcccggtgcctga

SEQ ID NO: 21930 - DNA, 2205 bp, Artificial Sequence
  Synthetic Polynucleotide
atggccttaccagtgaccgccttgctcctgccgctggccttgctgctccacgccgccaggccggaggttcagctgcttgagtctggcggaggactggttcaacctggcggaagcctgagactgtcttgtgccgccagcggcttcacctttagcagctacgccatgagctgggtccgacaggctcctggcaaaggactggaatgggtgtccagcatcagcggcagcggcgactacatctactacgccgatagcgtgaagggcagattcaccatcagccgggacatcagcaagaacaccctgtacctccagatgaacagcctgagagccgaggacaccgccgtgtactactgtgccaaagaaggcaccggcgctaacagcagcctggccgattatagaggccagggcacactggtcaccgtgtctagtctcgagagcggcggaggcggatctttcgaagttcagctgcttgaaagcggtggcggcctggttcaacctggcggatctctgagactgagctgtgccgccagcggcttcatcttctccatctacgccatgtcctgggtccgacaggcccctggaaaaggactggaatgggtgtccggcatctctggcagcggcgtgaacacctactacgccgattctgtgaagggccgcttcatcatcagccgggacaacagcagaaacaccgtgtacctccagatgaacagcctgagagccgatgacaccgccgtgtaccactgcgccaatggcaaaggctgggacggcaacacttggtacgaggattacagaggacagggaaccctcgtgaccgtgtctagtacgcgtgagcagaaactgatctcggaagaggatctggcgaagcccaccacgacgccagcgccgcgaccaccaacaccggcgcccaccatcgcgtcgcagcccctgtccctgcgcccagaggcgtgccggccagcggcggggggcgcagtgcacacgagggggctggacttcgcctgtgacatctacatctgggcgcccttggccgggacttgtggggtccttctcctgtcactggttatcaccctttactgcaaacggggcagaaagaaactcctgtatatattcaaacaaccatttatgagaccagtacaaactactcaagaggaagatggctgtagctgccgatttccagaagaagaagaaggaggatgtgaactgagagtgaagttcagcaggagcgcagacgcccccgcgtaccagcagggccagaaccagctctataacgagctgaatctaggacgaagagaggagtacgatgttttggacaagagacgtggccgggaccctgagatggggggaaagccgagaaggaagaaccctcaggaaggcctgtacaatgaactgcagaaagataagatggcggaggcctacagtgagattgggatgaaaggcgagcgccggaggggcaaggggcacgatggcctttaccagggtctcagtacagccaccaaggacacctacgacgcccttcacatgcaggccctgccccctcgctctagtggctccggcgagggcagaggaagtctactaacctgcggagatgtggaagaaaatcctggcccacatatgaccgagtacaagcccacggtgcgcctcgccacccgcgacgacgtccccagggccgtacgcaccctcgccgccgcgttcgccgactaccccgccacgcgccacaccgtcgatccggaccgccacatcgagcgggtcaccgagctgcaagaactcttcctcacgcgcgtcgggctcgacatcggcaaggtgtgggtcgcggacgacggcgccgcggtggcggtctggaccacgccggagagcgtcgaagcgggggcggtgttcgccgagatcggcccgcgcatggccgagttgagcggttcccggctggccgcgcagcaacagatggaaggcctcctggcgccgcaccggcccaaggagcccgcgtggttcctggccaccgtcggcgtctcgcccgaccaccagggcaagggtctgggcagcgccgtcgtgctccccggagtggaggcggccgagcgcgccggggtgcccgccttcctggagacctccgcgccccgcaacctccccttctacgagcggctcggcttcaccgtcaccgccgacgtcgaggtgcccgaaggaccgcgcacctggtgcatgacccgcaagcccggtgcctga

SEQ ID NO: 21931 - DNA, 2196 bp, Artificial Sequence
  Synthetic Polynucleotide
atggccttaccagtgaccgccttgctcctgccgctggccttgctgctccacgccgccaggccgcaggtgcagctggttgaatctggcggaggactggttcagcctggcggatctctgagactgtcttgtgccgccagcggcttcaccttcaccaatcacgccatgagctgggtccgacaggcccctggaaaaggactggaactggtgtctagcatcagcggcaacggcagaaccacctactacgccgatagcgtgaagggcagattcaccatcagccgggacatcagcaagaacaccctggacctccagatgaacagcctgagagccgaggataccgccgtgtactactgtgccaaggatggcggagagacactggtggatagcagaggccagggcacactggtcacagtgtcatctctcgagagcggcggaggcggatctttcgaagttcagctgcttgaaagcggtggcggcctggttcaacctggcggatctctgagactgagctgtgccgccagcggcttcatcttctccatctacgccatgtcctgggtccgacaggcccctggaaaaggactggaatgggtgtccggcatctctggcagcggcgtgaacacctactacgccgattctgtgaagggccgcttcatcatcagccgggacaacagcagaaacaccgtgtacctccagatgaacagcctgagagccgatgacaccgccgtgtaccactgcgccaatggcaaaggctgggacggcaacacttggtacgaggattacagaggacagggaaccctcgtgaccgtgtctagtacgcgtgagcagaaactgatctcggaagaggatctggcgaagcccaccacgacgccagcgccgcgaccaccaacaccggcgcccaccatcgcgtcgcagcccctgtccctgcgcccagaggcgtgccggccagcggcggggggcgcagtgcacacgagggggctggacttcgcctgtgacatctacatctgggcgcccttggccgggacttgtggggtccttctcctgtcactggttatcaccctttactgcaaacggggcagaaagaaactcctgtatatattcaaacaaccatttatgagaccagtacaaactactcaagaggaagatggctgtagctgccgatttccagaagaagaagaaggaggatgtgaactgagagtgaagttcagcaggagcgcagacgcccccgcgtaccagcagggccagaaccagctctataacgagctgaatctaggacgaagagaggagtacgatgttttggacaagagacgtggccgggaccctgagatggggggaaagccgagaaggaagaaccctcaggaaggcctgtacaatgaactgcagaaagataagatggcggaggcctacagtgagattgggatgaaaggcgagcgccggaggggcaaggggcacgatggcctttaccagggtctcagtacagccaccaaggacacctacgacgcccttcacatgcaggccctgccccctcgctctagtggctccggcgagggcagaggaagtctactaacctgcggagatgtggaagaaaatcctggcccacatatgaccgagtacaagcccacggtgcgcctcgccacccgcgacgacgtccccagggccgtacgcaccctcgccgccgcgttcgccgactaccccgccacgcgccacaccgtcgatccggaccgccacatcgagcgggtcaccgagctgcaagaactcttcctcacgcgcgtcgggctcgacatcggcaaggtgtgggtcgcggacgacggcgccgcggtggcggtctggaccacgccggagagcgtcgaagcgggggcggtgttcgccgagatcggcccgcgcatggccgagttgagcggttcccggctggccgcgcagcaacagatggaaggcctcctggcgccgcaccggcccaaggagcccgcgtggttcctggccaccgtcggcgtctcgcccgaccaccagggcaagggtctgggcagcgccgtcgtgctccccggagtggaggcggccgagcgcgccggggtgcccgccttcctggagacctccgcgccccgcaacctccccttctacgagcggctcggcttcaccgtcaccgccgacgtcgaggtgcccgaaggaccgcgcacctggtgcatgacccgcaagcccggtgcctga

SEQ ID NO: 21932 - DNA, 2196 bp, Artificial Sequence
  Synthetic Polynucleotide
atggccttaccagtgaccgccttgctcctgccgctggccttgctgctccacgccgccaggccggaggttcagctgcttgagtctggcggaggactggttcaacctggcggaagcctgagactgtcttgtgccgccagcggcttcacctttagcagctacgccatgagctgggtccgacaggctcctggcaaaggactggaatgggtgtccagcatcagcggcagcggcgactacatctactacgccgatagcgtgaagggcagattcaccatcagccgggacatcagcaagaacaccctgtacctccagatgaacagcctgagagccgaggacaccgccgtgtactactgtgccaaagaaggcaccggcgctaacagcagcctggccgattatagaggccagggcacactggtcaccgtgtctagtctcgagagcggcggaggcggatctttcgaagtgcagctgcttgaaagtggcggcggactgattcagcctggcggatctctgagactgagctgtgccgccagcggcttcaccttttctagccacgccatgacctgggtccgacaggcacctggaaaagggcttgaatgggtgtccgccatcagcggctctggcgattacacacactacgccgacagcgtgaagggcagattcaccatcagcagagacaacagcaagaacaccgtgtacctccagatgaacagcctgagagccgaggacagcgccgtgtattattgcgccaaggatgaggatggcggcagcctgcttggacacagaggacaaggcaccctggtcaccgtttcttccacgcgtgagcagaaactgatctcggaagaggatctggcgaagcccaccacgacgccagcgccgcgaccaccaacaccggcgcccaccatcgcgtcgcagcccctgtccctgcgcccagaggcgtgccggccagcggcggggggcgcagtgcacacgagggggctggacttcgcctgtgacatctacatctgggcgcccttggccgggacttgtggggtccttctcctgtcactggttatcaccctttactgcaaacggggcagaaagaaactcctgtatatattcaaacaaccatttatgagaccagtacaaactactcaagaggaagatggctgtagctgccgatttccagaagaagaagaaggaggatgtgaactgagagtgaagttcagcaggagcgcagacgcccccgcgtaccagcagggccagaaccagctctataacgagctgaatctaggacgaagagaggagtacgatgttttggacaagagacgtggccgggaccctgagatggggggaaagccgagaaggaagaaccctcaggaaggcctgtacaatgaactgcagaaagataagatggcggaggcctacagtgagattgggatgaaaggcgagcgccggaggggcaaggggcacgatggcctttaccagggtctcagtacagccaccaaggacacctacgacgcccttcacatgcaggccctgccccctcgctctagtggctccggcgagggcagaggaagtctactaacctgcggagatgtggaagaaaatcctggcccacatatgaccgagtacaagcccacggtgcgcctcgccacccgcgacgacgtccccagggccgtacgcaccctcgccgccgcgttcgccgactaccccgccacgcgccacaccgtcgatccggaccgccacatcgagcgggtcaccgagctgcaagaactcttcctcacgcgcgtcgggctcgacatcggcaaggtgtgggtcgcggacgacggcgccgcggtggcggtctggaccacgccggagagcgtcgaagcgggggcggtgttcgccgagatcggcccgcgcatggccgagttgagcggttcccggctggccgcgcagcaacagatggaaggcctcctggcgccgcaccggcccaaggagcccgcgtggttcctggccaccgtcggcgtctcgcccgaccaccagggcaagggtctgggcagcgccgtcgtgctccccggagtggaggcggccgagcgcgccggggtgcccgccttcctggagacctccgcgccccgcaacctccccttctacgagcggctcggcttcaccgtcaccgccgacgtcgaggtgcccgaaggaccgcgcacctggtgcatgacccgcaagcccggtgcctga

SEQ ID NO: 21933 - DNA, 2187 bp, Artificial Sequence
  Synthetic Polynucleotide
atggccttaccagtgaccgccttgctcctgccgctggccttgctgctccacgccgccaggccgcagctccagctgcaagagtctggacctggcctggtcaagcctagcgagacactgagcctgacctgtaccgtgtccggcgatagcatcagcagcggcgattactactggggctggatcagacagcctcctggcaaaggactggaatggatcggccacatctactacagcggcgtgacctactacaaccccagcctgaagtccagagtgaccatcagcgtggacaccagccggaaccagttctccctgaagctgtctagcgtgacagccgccgataccgccgtgtactactgcaccagagaggacagcagcaactggcggagtagaggccagggaacactggtcacagttagctctctcgagagcggcggaggcggatctttcgaacaggtgcagctggttgaatctggcggaggactggttcagcctggcggatctctgagactgtcttgtgccgccagcggcttcaccttcaccaatcacgccatgagctgggtccgacaggcccctggaaaaggactggaactggtgtctagcatcagcggcaacggcagaaccacctactacgccgatagcgtgaagggcagattcaccatcagccgggacatcagcaagaacaccctggacctccagatgaacagcctgagagccgaggataccgccgtgtactactgtgccaaggatggcggagagacactggtggatagcagaggccagggcacactggtcacagtgtcatctacgcgtgagcagaaactgatctcggaagaggatctggcgaagcccaccacgacgccagcgccgcgaccaccaacaccggcgcccaccatcgcgtcgcagcccctgtccctgcgcccagaggcgtgccggccagcggcggggggcgcagtgcacacgagggggctggacttcgcctgtgacatctacatctgggcgcccttggccgggacttgtggggtccttctcctgtcactggttatcaccctttactgcaaacggggcagaaagaaactcctgtatatattcaaacaaccatttatgagaccagtacaaactactcaagaggaagatggctgtagctgccgatttccagaagaagaagaaggaggatgtgaactgagagtgaagttcagcaggagcgcagacgcccccgcgtaccagcagggccagaaccagctctataacgagctgaatctaggacgaagagaggagtacgatgttttggacaagagacgtggccgggaccctgagatggggggaaagccgagaaggaagaaccctcaggaaggcctgtacaatgaactgcagaaagataagatggcggaggcctacagtgagattgggatgaaaggcgagcgccggaggggcaaggggcacgatggcctttaccagggtctcagtacagccaccaaggacacctacgacgcccttcacatgcaggccctgccccctcgctctagtggctccggcgagggcagaggaagtctactaacctgcggagatgtggaagaaaatcctggcccacatatgaccgagtacaagcccacggtgcgcctcgccacccgcgacgacgtccccagggccgtacgcaccctcgccgccgcgttcgccgactaccccgccacgcgccacaccgtcgatccggaccgccacatcgagcgggtcaccgagctgcaagaactcttcctcacgcgcgtcgggctcgacatcggcaaggtgtgggtcgcggacgacggcgccgcggtggcggtctggaccacgccggagagcgtcgaagcgggggcggtgttcgccgagatcggcccgcgcatggccgagttgagcggttcccggctggccgcgcagcaacagatggaaggcctcctggcgccgcaccggcccaaggagcccgcgtggttcctggccaccgtcggcgtctcgcccgaccaccagggcaagggtctgggcagcgccgtcgtgctccccggagtggaggcggccgagcgcgccggggtgcccgccttcctggagacctccgcgccccgcaacctccccttctacgagcggctcggcttcaccgtcaccgccgacgtcgaggtgcccgaaggaccgcgcacctggtgcatgacccgcaagcccggtgcctga

SEQ ID NO: 21934 - DNA, 2187 bp, Artificial Sequence; identical to SEQ ID NO: 6756
  Synthetic Polynucleotide

SEQ ID NO: 21935 - DNA, 2196 bp, Artificial Sequence
  Synthetic Polynucleotide
atggccttaccagtgaccgccttgctcctgccgctggccttgctgctccacgccgccaggccgcagctccagctgcaagagtctggacctggcctggtcaagcctagcgagacactgagcctgacctgtaccgtgtccggcgatagcatcagcagcggcgattactactggggctggatcagacagcctcctggcaaaggactggaatggatcggccacatctactacagcggcgtgacctactacaaccccagcctgaagtccagagtgaccatcagcgtggacaccagccggaaccagttctccctgaagctgtctagcgtgacagccgccgataccgccgtgtactactgcaccagagaggacagcagcaactggcggagtagaggccagggaacactggtcacagttagctctctcgagagcggcggaggcggatctttcgaagaggttcagctgcttgagtctggcggaggactggttcaacctggcggaagcctgagactgtcttgtgccgccagcggcttcacctttagcagctacgccatgagctgggtccgacaggctcctggcaaaggactggaatgggtgtccagcatcagcggcagcggcgactacatctactacgccgatagcgtgaagggcagattcaccatcagccgggacatcagcaagaacaccctgtacctccagatgaacagcctgagagccgaggacaccgccgtgtactactgtgccaaagaaggcaccggcgctaacagcagcctggccgattatagaggccagggcacactggtcaccgtgtctagtacgcgtgagcagaaactgatctcggaagaggatctggcgaagcccaccacgacgccagcgccgcgaccaccaacaccggcgcccaccatcgcgtcgcagcccctgtccctgcgcccagaggcgtgccggccagcggcggggggcgcagtgcacacgagggggctggacttcgcctgtgacatctacatctgggcgcccttggccgggacttgtggggtccttctcctgtcactggttatcaccctttactgcaaacggggcagaaagaaactcctgtatatattcaaacaaccatttatgagaccagtacaaactactcaagaggaagatggctgtagctgccgatttccagaagaagaagaaggaggatgtgaactgagagtgaagttcagcaggagcgcagacgcccccgcgtaccagcagggccagaaccagctctataacgagctgaatctaggacgaagagaggagtacgatgttttggacaagagacgtggccgggaccctgagatggggggaaagccgagaaggaagaaccctcaggaaggcctgtacaatgaactgcagaaagataagatggcggaggcctacagtgagattgggatgaaaggcgagcgccggaggggcaaggggcacgatggcctttaccagggtctcagtacagccaccaaggacacctacgacgcccttcacatgcaggccctgccccctcgctctagtggctccggcgagggcagaggaagtctactaacctgcggagatgtggaagaaaatcctggcccacatatgaccgagtacaagcccacggtgcgcctcgccacccgcgacgacgtccccagggccgtacgcaccctcgccgccgcgttcgccgactaccccgccacgcgccacaccgtcgatccggaccgccacatcgagcgggtcaccgagctgcaagaactcttcctcacgcgcgtcgggctcgacatcggcaaggtgtgggtcgcggacgacggcgccgcggtggcggtctggaccacgccggagagcgtcgaagcgggggcggtgttcgccgagatcggcccgcgcatggccgagttgagcggttcccggctggccgcgcagcaacagatggaaggcctcctggcgccgcaccggcccaaggagcccgcgtggttcctggccaccgtcggcgtctcgcccgaccaccagggcaagggtctgggcagcgccgtcgtgctccccggagtggaggcggccgagcgcgccggggtgcccgccttcctggagacctccgcgccccgcaacctccccttctacgagcggctcggcttcaccgtcaccgccgacgtcgaggtgcccgaaggaccgcgcacctggtgcatgacccgcaagcccggtgcctga

SEQ ID NO: 21936 - DNA, 2187 bp, Artificial Sequence
  Synthetic Polynucleotide
atggccttaccagtgaccgccttgctcctgccgctggccttgctgctccacgccgccaggccgcaggtgcagctggttgaatctggcggaggactggttcagcctggcggatctctgagactgtcttgtgccgccagcggcttcaccttcaccaatcacgccatgagctgggtccgacaggcccctggaaaaggactggaactggtgtctagcatcagcggcaacggcagaaccacctactacgccgatagcgtgaagggcagattcaccatcagccgggacatcagcaagaacaccctggacctccagatgaacagcctgagagccgaggataccgccgtgtactactgtgccaaggatggcggagagacactggtggatagcagaggccagggcacactggtcacagtgtcatctctcgagagcggcggaggcggatctttcgaagtgcagctgcttgaaagtggcggcggactgattcagcctggcggatctctgagactgagctgtgccgccagcggcttcaccttttctagccacgccatgacctgggtccgacaggcacctggaaaagggcttgaatgggtgtccgccatcagcggctctggcgattacacacactacgccgacagcgtgaagggcagattcaccatcagcagagacaacagcaagaacaccgtgtacctccagatgaacagcctgagagccgaggacagcgccgtgtattattgcgccaaggatgaggatggcggcagcctgcttggacacagaggacaaggcaccctggtcaccgtttcttccacgcgtgagcagaaactgatctcggaagaggatctggcgaagcccaccacgacgccagcgccgcgaccaccaacaccggcgcccaccatcgcgtcgcagcccctgtccctgcgcccagaggcgtgccggccagcggcggggggcgcagtgcacacgagggggctggacttcgcctgtgacatctacatctgggcgcccttggccgggacttgtggggtccttctcctgtcactggttatcaccctttactgcaaacggggcagaaagaaactcctgtatatattcaaacaaccatttatgagaccagtacaaactactcaagaggaagatggctgtagctgccgatttccagaagaagaagaaggaggatgtgaactgagagtgaagttcagcaggagcgcagacgcccccgcgtaccagcagggccagaaccagctctataacgagctgaatctaggacgaagagaggagtacgatgttttggacaagagacgtggccgggaccctgagatggggggaaagccgagaaggaagaaccctcaggaaggcctgtacaatgaactgcagaaagataagatggcggaggcctacagtgagattgggatgaaaggcgagcgccggaggggcaaggggcacgatggcctttaccagggtctcagtacagccaccaaggacacctacgacgcccttcacatgcaggccctgccccctcgctctagtggctccggcgagggcagaggaagtctactaacctgcggagatgtggaagaaaatcctggcccacatatgaccgagtacaagcccacggtgcgcctcgccacccgcgacgacgtccccagggccgtacgcaccctcgccgccgcgttcgccgactaccccgccacgcgccacaccgtcgatccggaccgccacatcgagcgggtcaccgagctgcaagaactcttcctcacgcgcgtcgggctcgacatcggcaaggtgtgggtcgcggacgacggcgccgcggtggcggtctggaccacgccggagagcgtcgaagcgggggcggtgttcgccgagatcggcccgcgcatggccgagttgagcggttcccggctggccgcgcagcaacagatggaaggcctcctggcgccgcaccggcccaaggagcccgcgtggttcctggccaccgtcggcgtctcgcccgaccaccagggcaagggtctgggcagcgccgtcgtgctccccggagtggaggcggccgagcgcgccggggtgcccgccttcctggagacctccgcgccccgcaacctccccttctacgagcggctcggcttcaccgtcaccgccgacgtcgaggtgcccgaaggaccgcgcacctggtgcatgacccgcaagcccggtgcctga

SEQ ID NO: 21937 - DNA, 1803 bp, Artificial Sequence; identical to SEQ ID NO: 21923
  Synthetic Polynucleotide

SEQ ID NO: 21938 - DNA, 1809 bp, Artificial Sequence; identical to SEQ ID NO: 21924
  Synthetic Polynucleotide

SEQ ID NO: 21939 - DNA, 1830 bp, Artificial Sequence; identical to SEQ ID NO: 21925
  Synthetic Polynucleotide

SEQ ID NO: 21940 - DNA, 2205 bp, Artificial Sequence
  Synthetic Polynucleotide
atggccttaccagtgaccgccttgctcctgccgctggccttgctgctccacgccgccaggccggaggttcagctgcttgagtctggcggaggactggttcaacctggcggaagcctgagactgtcttgtgccgccagcggcttcacctttagcagctacgccatgagctgggtccgacaggctcctggcaaaggactggaatgggtgtccagcatcagcggcagcggcgactacatctactacgccgatagcgtgaagggcagattcaccatcagccgggacatcagcaagaacaccctgtacctccagatgaacagcctgagagccgaggacaccgccgtgtactactgtgccaaagaaggcaccggcgctaacagcagcctggccgattatagaggccagggcacactggtcaccgtgtctagtctcgagagcggcggaggcggatctttcgaagttcagctgcttgagtctggcggaggactggttcaacctggcggaagcctgagactgtcttgtgccgccagcggcttcatcttcagcagctacgccatgagctgggtccgacaggctcctggaaagggccaagaatgggtttccggcgttagcggcacaggcgtgaacacctactacgccgatagcgtgaagggcagattcaccatcagccgggacaacagcaagaacaccctgtacctccagatgaacagcctgagagccgaggacaccgccgtgtactattgtgcctctggcaaaggctgggacagcggctcttggtacgaggactatagaggccagggcaccctggtcacagtttcttcaacgcgtgagcagaaactgatctcggaagaggatctggcgaagcccaccacgacgccagcgccgcgaccaccaacaccggcgcccaccatcgcgtcgcagcccctgtccctgcgcccagaggcgtgccggccagcggcggggggcgcagtgcacacgagggggctggacttcgcctgtgacatctacatctgggcgcccttggccgggacttgtggggtccttctcctgtcactggttatcaccctttactgcaaacggggcagaaagaaactcctgtatatattcaaacaaccatttatgagaccagtacaaactactcaagaggaagatggctgtagctgccgatttccagaagaagaagaaggaggatgtgaactgagagtgaagttcagcaggagcgcagacgcccccgcgtaccagcagggccagaaccagctctataacgagctgaatctaggacgaagagaggagtacgatgttttggacaagagacgtggccgggaccctgagatggggggaaagccgagaaggaagaaccctcaggaaggcctgtacaatgaactgcagaaagataagatggcggaggcctacagtgagattgggatgaaaggcgagcgccggaggggcaaggggcacgatggcctttaccagggtctcagtacagccaccaaggacacctacgacgcccttcacatgcaggccctgccccctcgctctagtggctccggcgagggcagaggaagtctactaacctgcggagatgtggaagaaaatcctggcccacatatgaccgagtacaagcccacggtgcgcctcgccacccgcgacgacgtccccagggccgtacgcaccctcgccgccgcgttcgccgactaccccgccacgcgccacaccgtcgatccggaccgccacatcgagcgggtcaccgagctgcaagaactcttcctcacgcgcgtcgggctcgacatcggcaaggtgtgggtcgcggacgacggcgccgcggtggcggtctggaccacgccggagagcgtcgaagcgggggcggtgttcgccgagatcggcccgcgcatggccgagttgagcggttcccggctggccgcgcagcaacagatggaaggcctcctggcgccgcaccggcccaaggagcccgcgtggttcctggccaccgtcggcgtctcgcccgaccaccagggcaagggtctgggcagcgccgtcgtgctccccggagtggaggcggccgagcgcgccggggtgcccgccttcctggagacctccgcgccccgcaacctccccttctacgagcggctcggcttcaccgtcaccgccgacgtcgaggtgcccgaaggaccgcgcacctggtgcatgacccgcaagcccggtgcctga

SEQ ID NO: 21941 - DNA, 2187 bp, Artificial Sequence
  Synthetic Polynucleotide
atggccttaccagtgaccgccttgctcctgccgctggccttgctgctccacgccgccaggccgcagctccagctgcaagagtctggacctggcctggtcaagcctagcgagacactgagcctgacctgtaccgtgtccggcgatagcatcagcagcggcgattactactggggctggatcagacagcctcctggcaaaggactggaatggatcggccacatctactacagcggcgtgacctactacaaccccagcctgaagtccagagtgaccatcagcgtggacaccagccggaaccagttctccctgaagctgtctagcgtgacagccgccgataccgccgtgtactactgcaccagagaggacagcagcaactggcggagtagaggccagggaacactggtcacagttagctctctcgacagcggcggaggcggatctttcgaacagctccagttgcaagagagcggccctggcttggtaaaaccttccgagacccttagcctcacatgcacggttagtgggggcagcatttcctcaggtgattactattggggatggattcggcaacccccgggtaaaggattggagtggattggtcatatttattatagtggagcgacgtactacaacccaagtctcaaatccagggttacaatatccgtcgatacgagcaggaaccaattcagcttgaaactttctagtgtcaccgcagcagacacagccgtctattactgtacgcgggatgactccagtaattggcggtcccgagggcaagggacactggtcacggtctcctcaacgcgtgagcagaaactgatctcggaagaggatctggcgaagcccaccacgacgccagcgccgcgaccaccaacaccggcgcccaccatcgcgtcgcagcccctgtccctgcgcccagaggcgtgccggccagcggcggggggcgcagtgcacacgagggggctggacttcgcctgtgacatctacatctgggcgcccttggccgggacttgtggggtccttctcctgtcactggttatcaccctttactgcaaacggggcagaaagaaactcctgtatatattcaaacaaccatttatgagaccagtacaaactactcaagaggaagatggctgtagctgccgatttccagaagaagaagaaggaggatgtgaactgagagtgaagttcagcaggagcgcagacgcccccgcgtaccagcagggccagaaccagctctataacgagctgaatctaggacgaagagaggagtacgatgttttggacaagagacgtggccgggaccctgagatggggggaaagccgagaaggaagaaccctcaggaaggcctgtacaatgaactgcagaaagataagatggcggaggcctacagtgagattgggatgaaaggcgagcgccggaggggcaaggggcacgatggcctttaccagggtctcagtacagccaccaaggacacctacgacgcccttcacatgcaggccctgccccctcgctctagtggctccggcgagggcagaggaagtctactaacctgcggagatgtggaagaaaatcctggcccacatatgaccgagtacaagcccacggtgcgcctcgccacccgcgacgacgtccccagggccgtacgcaccctcgccgccgcgttcgccgactaccccgccacgcgccacaccgtcgatccggaccgccacatcgagcgggtcaccgagctgcaagaactcttcctcacgcgcgtcgggctcgacatcggcaaggtgtgggtcgcggacgacggcgccgcggtggcggtctggaccacgccggagagcgtcgaagcgggggcggtgttcgccgagatcggcccgcgcatggccgagttgagcggttcccggctggccgcgcagcaacagatggaaggcctcctggcgccgcaccggcccaaggagcccgcgtggttcctggccaccgtcggcgtctcgcccgaccaccagggcaagggtctgggcagcgccgtcgtgctccccggagtggaggcggccgagcgcgccggggtgcccgccttcctggagacctccgcgccccgcaacctccccttctacgagcggctcggcttcaccgtcaccgccgacgtcgaggtgcccgaaggaccgcgcacctggtgcatgacccgcaagcccggtgcctga

SEQ ID NO: 21942 - DNA, 1812 bp, Artificial Sequence
  Synthetic Polynucleotide
atggccttaccagtgaccgccttgctcctgccgctggccttgctgctccacgccgccaggccggaggttcagctgcttgagtctggcggaggactggttcaacctggcggaagcctgagactgtcttgtgccgccagcggcttcacctttagcagctacgccatgagctgggtccgacaggctcctggcaaaggactggaatgggtgtccagcatcagcggcagcggcgactacatctactacgccgatagcgtgaagggcagattcaccatcagccgggacatcagcaagaacaccctgtacctccagatgaacagcctgagagccgaggacaccgccgtgtactactgtgccaaagaaggcaccggcgctaacagcagcctggccgattatagaggccagggcacactggtcaccgtgtctagtacgcgtgagcagaaactgatctcggaagaggatctggcgaagcccaccacgacgccagcgccgcgaccaccaacaccggcgcccaccatcgcgtcgcagcccctgtccctgcgcccagaggcgtgccggccagcggcggggggcgcagtgcacacgagggggctggacttcgcctgtgacatctacatctgggcgcccttggccgggacttgtggggtccttctcctgtcactggttatcaccctttactgcaaacggggcagaaagaaactcctgtatatattcaaacaaccatttatgagaccagtacaaactactcaagaggaagatggctgtagctgccgatttccagaagaagaagaaggaggatgtgaactgagagtgaagttcagcaggagcgcagacgcccccgcgtaccagcagggccagaaccagctctataacgagctgaatctaggacgaagagaggagtacgatgttttggacaagagacgtggccgggaccctgagatggggggaaagccgagaaggaagaaccctcaggaaggcctgtacaatgaactgcagaaagataagatggcggaggcctacagtgagattgggatgaaaggcgagcgccggaggggcaaggggcacgatggcctttaccagggtctcagtacagccaccaaggacacctacgacgcccttcacatgcaggccctgccccctcgctctagtggctccggcgagggcagaggaagtctactaacctgcggagatgtggaagaaaatcctggcccacatatgaccgagtacaagcccacggtgcgcctcgccacccgcgacgacgtccccagggccgtacgcaccctcgccgccgcgttcgccgactaccccgccacgcgccacaccgtcgatccggaccgccacatcgagcgggtcaccgagctgcaagaactcttcctcacgcgcgtcgggctcgacatcggcaaggtgtgggtcgcggacgacggcgccgcggtggcggtctggaccacgccggagagcgtcgaagcgggggcggtgttcgccgagatcggcccgcgcatggccgagttgagcggttcccggctggccgcgcagcaacagatggaaggcctcctggcgccgcaccggcccaaggagcccgcgtggttcctggccaccgtcggcgtctcgcccgaccaccagggcaagggtctgggcagcgccgtcgtgctccccggagtggaggcggccgagcgcgccggggtgcccgccttcctggagacctccgcgccccgcaacctccccttctacgagcggctcggcttcaccgtcaccgccgacgtcgaggtgcccgaaggaccgcgcacctggtgcatgacccgcaagcccggtgcctga

SEQ ID NO: 21943 - DNA, 2193 bp, Artificial Sequence
  Synthetic Polynucleotide
atggccttaccagtgaccgccttgctcctgccgctggccttgctgctccacgccgccaggccgcaggtgcagctggttgaatctggcggaggactggttcagcctggcggatctctgagactgtcttgtgccgccagcggcttcaccttcaccaatcacgccatgagctgggtccgacaggcccctggaaaaggactggaactggtgtctagcatcagcggcaacggcagaaccacctactacgccgatagcgtgaagggcagattcaccatcagccgggacatcagcaagaacaccctggacctccagatgaacagcctgagagccgaggataccgccgtgtactactgtgccaaggatggcggagagacactggtggatagcagaggccagggcacactggtcacagtgtcatctctcgagagcggcggaggcggatctttcgaagttcagctggtggaaagtggcggaggcgttgtgcaacccggaagatcactgagactgagctgtgccgcttccggctatacctttacctcctacgtgatgcactgggtccgacaggctccaggcaaaggactggaatggatcggatatatcaatccgtacaatgatgggacgtactatgccgacagcgtgaaaggccggttcaccatctccagagacaactccaagaacacgctctatctgcaaatgaactctctgcgggccgaagatacagccgtgtattactgcgctcggggaacctactactatggcacacgggttttcgattactggggccagggaactatggttacagtgtccagcacgcgtgagcagaaactgatctcggaagaggatctggcgaagcccaccacgacgccagcgccgcgaccaccaacaccggcgcccaccatcgcgtcgcagcccctgtccctgcgcccagaggcgtgccggccagcggcggggggcgcagtgcacacgagggggctggacttcgcctgtgacatctacatctgggcgcccttggccgggacttgtggggtccttctcctgtcactggttatcaccctttactgcaaacggggcagaaagaaactcctgtatatattcaaacaaccatttatgagaccagtacaaactactcaagaggaagatggctgtagctgccgatttccagaagaagaagaaggaggatgtgaactgagagtgaagttcagcaggagcgcagacgcccccgcgtaccagcagggccagaaccagctctataacgagctgaatctaggacgaagagaggagtacgatgttttggacaagagacgtggccgggaccctgagatggggggaaagccgagaaggaagaaccctcaggaaggcctgtacaatgaactgcagaaagataagatggcggaggcctacagtgagattgggatgaaaggcgagcgccggaggggcaaggggcacgatggcctttaccagggtctcagtacagccaccaaggacacctacgacgcccttcacatgcaggccctgccccctcgctctagtggctccggcgagggcagaggaagtctactaacctgcggagatgtggaagaaaatcctggcccacatatgaccgagtacaagcccacggtgcgcctcgccacccgcgacgacgtccccagggccgtacgcaccctcgccgccgcgttcgccgactaccccgccacgcgccacaccgtcgatccggaccgccacatcgagcgggtcaccgagctgcaagaactcttcctcacgcgcgtcgggctcgacatcggcaaggtgtgggtcgcggacgacggcgccgcggtggcggtctggaccacgccggagagcgtcgaagcgggggcggtgttcgccgagatcggcccgcgcatggccgagttgagcggttcccggctggccgcgcagcaacagatggaaggcctcctggcgccgcaccggcccaaggagcccgcgtggttcctggccaccgtcggcgtctcgcccgaccaccagggcaagggtctgggcagcgccgtcgtgctccccggagtggaggcggccgagcgcgccggggtgcccgccttcctggagacctccgcgccccgcaacctccccttctacgagcggctcggcttcaccgtcaccgccgacgtcgaggtgcccgaaggaccgcgcacctggtgcatgacccgcaagcccggtgcctga

SEQ ID NO: 21944 - DNA, 1803 bp, Artificial Sequence
  Synthetic Polynucleotide
atggccttaccagtgaccgccttgctcctgccgctggccttgctgctccacgccgccaggccggaagttcagctggttgaaagcggtggtggtctggttcagcctggtggtagcctgcgtctgagctgtgcagcaagctcttttaatatcaaagatacctatattggttgggttcgtcgtgcaccgggtaaaggtacagaactggttgcagacatttactgctctgaaggttctacccgttatgcagatagcgtgaaaggtcgttttaccattagctgcgataccagcaaaaataccgcatatctgcagatgaatagcctgcgtgccgaggacacggccgtatattactgtgcggctgtttctgactacgttgttttctactactgggggcaaggaaccaccgtcaccgtctccagtacgcgtgagcagaaactgatctcggaagaggatctggcgaagcccaccacgacgccagcgccgcgaccaccaacaccggcgcccaccatcgcgtcgcagcccctgtccctgcgcccagaggcgtgccggccagcggcggggggcgcagtgcacacgagggggctggacttcgcctgtgacatctacatctgggcgcccttggccgggacttgtggggtccttctcctgtcactggttatcaccctttactgcaaacggggcagaaagaaactcctgtatatattcaaacaaccatttatgagaccagtacaaactactcaagaggaagatggctgtagctgccgatttccagaagaagaagaaggaggatgtgaactgagagtgaagttcagcaggagcgcagacgcccccgcgtaccagcagggccagaaccagctctataacgagctgaatctaggacgaagagaggagtacgatgttttggacaagagacgtggccgggaccctgagatggggggaaagccgagaaggaagaaccctcaggaaggcctgtacaatgaactgcagaaagataagatggcggaggcctacagtgagattgggatgaaaggcgagcgccggaggggcaaggggcacgatggcctttaccagggtctcagtacagccaccaaggacacctacgacgcccttcacatgcaggccctgccccctcgctctagtggctccggcgagggcagaggaagtctactaacctgcggagatgtggaagaaaatcctggcccacatatgaccgagtacaagcccacggtgcgcctcgccacccgcgacgacgtccccagggccgtacgcaccctcgccgccgcgttcgccgactaccccgccacgcgccacaccgtcgatccggaccgccacatcgagcgggtcaccgagctgcaagaactcttcctcacgcgcgtcgggctcgacatcggcaaggtgtgggtcgcggacgacggcgccgcggtggcggtctggaccacgccggagagcgtcgaagcgggggcggtgttcgccgagatcggcccgcgcatggccgagttgagcggttcccggctggccgcgcagcaacagatggaaggcctcctggcgccgcaccggcccaaggagcccgcgtggttcctggccaccgtcggcgtctcgcccgaccaccagggcaagggtctgggcagcgccgtcgtgctccccggagtggaggcggccgagcgcgccggggtgcccgccttcctggagacctccgcgccccgcaacctccccttctacgagcggctcggcttcaccgtcaccgccgacgtcgaggtgcccgaaggaccgcgcacctggtgcatgacccgcaagcccggtgcctga

SEQ ID NO: 21945 - DNA, 1797 bp, Artificial Sequence
  Synthetic Polynucleotide
atggccttaccagtgaccgccttgctcctgccgctggccttgctgctccacgccgccaggccggaagttcagctggttgaaagcggtggtggtctggttcagcctggtggtagcctgcgtctgagctgtgcagcaagctcttttaatatcaaagatacctatattggttgggttcgtcgtgcaccgggtaaaggtacagaactggttgcatctattgactgcatctacggttacacccgttatgcagatagcgtgaaaggtcgttttaccattagctgcgataccagcaaaaataccgcatatctgcagatgaatagcctgcgtgccgaggacacggccgtatattactgtgcggctcagggttaccgtttgcattactgggggcaaggaaccaccgtcaccgtctccagtacgcgtgagcagaaactgatctcggaagaggatctggcgaagcccaccacgacgccagcgccgcgaccaccaacaccggcgcccaccatcgcgtcgcagcccctgtccctgcgcccagaggcgtgccggccagcggcggggggcgcagtgcacacgagggggctggacttcgcctgtgacatctacatctgggcgcccttggccgggacttgtggggtccttctcctgtcactggttatcaccctttactgcaaacggggcagaaagaaactcctgtatatattcaaacaaccatttatgagaccagtacaaactactcaagaggaagatggctgtagctgccgatttccagaagaagaagaaggaggatgtgaactgagagtgaagttcagcaggagcgcagacgcccccgcgtaccagcagggccagaaccagctctataacgagctgaatctaggacgaagagaggagtacgatgttttggacaagagacgtggccgggaccctgagatggggggaaagccgagaaggaagaaccctcaggaaggcctgtacaatgaactgcagaaagataagatggcggaggcctacagtgagattgggatgaaaggcgagcgccggaggggcaaggggcacgatggcctttaccagggtctcagtacagccaccaaggacacctacgacgcccttcacatgcaggccctgccccctcgctctagtggctccggcgagggcagaggaagtctactaacctgcggagatgtggaagaaaatcctggcccacatatgaccgagtacaagcccacggtgcgcctcgccacccgcgacgacgtccccagggccgtacgcaccctcgccgccgcgttcgccgactaccccgccacgcgccacaccgtcgatccggaccgccacatcgagcgggtcaccgagctgcaagaactcttcctcacgcgcgtcgggctcgacatcggcaaggtgtgggtcgcggacgacggcgccgcggtggcggtctggaccacgccggagagcgtcgaagcgggggcggtgttcgccgagatcggcccgcgcatggccgagttgagcggttcccggctggccgcgcagcaacagatggaaggcctcctggcgccgcaccggcccaaggagcccgcgtggttcctggccaccgtcggcgtctcgcccgaccaccagggcaagggtctgggcagcgccgtcgtgctccccggagtggaggcggccgagcgcgccggggtgcccgccttcctggagacctccgcgccccgcaacctccccttctacgagcggctcggcttcaccgtcaccgccgacgtcgaggtgcccgaaggaccgcgcacctggtgcatgacccgcaagcccggtgcctga

SEQ ID NO: 21946 - DNA, 2631 bp, Artificial Sequence
  Synthetic Polynucleotide
atggccttaccagtgaccgccttgctcctgccgctggccttgctgctccacgccgccaggccggcatgcgaagtgcagctgcttgaaagtggcggcggactgattcagcctggcggatctctgagactgagctgtgccgccagcggcttcaccttttctagccacgccatgacctgggtccgacaggcacctggaaaagggcttgaatgggtgtccgccatcagcggctctggcgattacacacactacgccgacagcgtgaagggcagattcaccatcagcagagacaacagcaagaacaccgtgtacctccagatgaacagcctgagagccgaggacagcgccgtgtattattgcgccaaggatgaggatggcggcagcctgcttggacacagaggacaaggcaccctggtcaccgtttcttccggtaccggcggaggcggatctggcggcggaggtagcggtggcggaggatctgaattcatcaacatctacaacgccgagcctgccaatcctagcgagaagaacagccccgaattcgacatcgtgatgacacagagccccgccacactgtcactgtctccaggcgaaagagccacactgagctgtcggagcagcaagagcctccagaacgtgaacggcaacacctacctgtactggttccagcagaagcccggccagtctcctcagctcctgatctacagaatgagcaacctgaacagcggcgtgcccgacagattttctggcagcggaagcggcaccgagttcaccctgaccataagcagcctggaacctgaggacttcgccgtgtactactgtatgcagcacctggaataccccatcaccttcggagccggcaccaagctggaaatcaaaggcggaggcggaagtggaggcggaggatctggcggcggaggctctgaagtgcaactggttgaatctggcggcggactggttaagcctggcggatctctgaagctgagctgtgccgccagcggctacacctttaccagctacgtgatgcactgggtccgacaggcccctggcaaaggacttgagtggatcggctacatcaacccctacaacgatggcaccaagtacaacgagaagttccagggcagagtgaccatcagctccgacaagagcatcagcaccgcctacatggaactgagcagcctgagaagcgaggataccgccatgtactattgcgccagaggcacctactactacggcaccagagtgttcgactactggggccagggaaccctggtcacagtctcttctacgcgtaccacgacgccagcgccgcgaccaccaacaccggcgcccaccatcgcgtcgcagcccctgtccctgcgcccagaggcgtgccggccagcggcggggggcgcagtgcacacgagggggctggacttcgcctgtgacatctacatctgggcgcccttggccgggacttgtggggtccttctcctgtcactggttatcaccctttactgcaaacggggcagaaagaaactcctgtatatattcaaacaaccatttatgagaccagtacaaactactcaagaggaagatggctgtagctgccgatttccagaagaagaagaaggaggatgtgaactgagagtgaagttcagcaggagcgcagacgcccccgcgtaccagcagggccagaaccagctctataacgagctgaatctaggacgaagagaggagtacgatgttttggacaagagacgtggccgggaccctgagatggggggaaagccgagaaggaagaaccctcaggaaggcctgtacaatgaactgcagaaagataagatggcggaggcctacagtgagattgggatgaaaggcgagcgccggaggggcaaggggcacgatggcctttaccagggtctcagtacagccaccaaggacacctacgacgcccttcacatgcaggccctgccccctcgctctagtggctccggcgagggcagaggaagtctactaacctgcggagatgtggaagaaaatcctggcccacatatgaccgagtacaagcccacggtgcgcctcgccacccgcgacgacgtccccagggccgtacgcaccctcgccgccgcgttcgccgactaccccgccacgcgccacaccgtcgatccggaccgccacatcgagcgggtcaccgagctgcaagaactcttcctcacgcgcgtcgggctcgacatcggcaaggtgtgggtcgcggacgacggcgccgcggtggcggtctggaccacgccggagagcgtcgaagcgggggcggtgttcgccgagatcggcccgcgcatggccgagttgagcggttcccggctggccgcgcagcaacagatggaaggcctcctggcgccgcaccggcccaaggagcccgcgtggttcctggccaccgtcggcgtctcgcccgaccaccagggcaagggtctgggcagcgccgtcgtgctccccggagtggaggcggccgagcgcgccggggtgcccgccttcctggagacctccgcgccccgcaacctccccttctacgagcggctcggcttcaccgtcaccgccgacgtcgaggtgcccgaaggaccgcgcacctggtgcatgacccgcaagcccggtgcctga

SEQ ID NO: 21947 - DNA, 2562 bp, Artificial Sequence
  Synthetic Polynucleotide
atggccttaccagtgaccgccttgctcctgccgctggccttgctgctccacgccgccaggccggcatgcgaagtgcagctgcttgaaagtggcggcggactgattcagcctggcggatctctgagactgagctgtgccgccagcggcttcaccttttctagccacgccatgacctgggtccgacaggcacctggaaaagggcttgaatgggtgtccgccatcagcggctctggcgattacacacactacgccgacagcgtgaagggcagattcaccatcagcagagacaacagcaagaacaccgtgtacctccagatgaacagcctgagagccgaggacagcgccgtgtattattgcgccaaggatgaggatggcggcagcctgcttggacacagaggacaaggcaccctggtcaccgtttcttccggtaccggcggaggcggatctggcggcggaggtagcggtggcggaggatctgaattcgacatccagatgacacagagccctagcagcctgtctgccagcgtgggagacagagtgaccatcacctgtagagccagccaggacgtgaacacagccgtggcttggtatcagcagaagcctggcaaggcccctaagctgctgatctacagcgccagctttctgtacagcggcgtgcccagcagattcagcggaagcagaagcggcaccgacttcaccctgacaatatccagcctccagcctgaggacttcgccacctactactgccagcaggcttacaccacacctccaacattcggccagggcaccaaggtggaaatcaagagaacaggcggaggcggaagtggaggcggaggatctggcggcggaggctctgaagtgcagctggttgaatcaggtggcggcctggttcaacctggcggatctctgagactgagctgtgccgccagcggcttcaacatcaaggacacctacatccactgggtccgacaggcccctggcaaaggacttgaatgggtcgccagaatctaccccaccaacggctacaccagatacgccgactctgtgaagggcagattcaccatcagcgccgacaccagcaagaacaccgcctacctccagatgaactccctgagagccgaggacaccgccgtgtactactgtagcagatggggcggagccggagcctacgctatggatgtttggggccagggaaccctggtcaccgtgtcatctacgcgtaccacgacgccagcgccgcgaccaccaacaccggcgcccaccatcgcgtcgcagcccctgtccctgcgcccagaggcgtgccggccagcggcggggggcgcagtgcacacgagggggctggacttcgcctgtgacatctacatctgggcgcccttggccgggacttgtggggtccttctcctgtcactggttatcaccctttactgcaaacggggcagaaagaaactcctgtatatattcaaacaaccatttatgagaccagtacaaactactcaagaggaagatggctgtagctgccgatttccagaagaagaagaaggaggatgtgaactgagagtgaagttcagcaggagcgcagacgcccccgcgtaccagcagggccagaaccagctctataacgagctgaatctaggacgaagagaggagtacgatgttttggacaagagacgtggccgggaccctgagatggggggaaagccgagaaggaagaaccctcaggaaggcctgtacaatgaactgcagaaagataagatggcggaggcctacagtgagattgggatgaaaggcgagcgccggaggggcaaggggcacgatggcctttaccagggtctcagtacagccaccaaggacacctacgacgcccttcacatgcaggccctgccccctcgctctagtggctccggcgagggcagaggaagtctactaacctgcggagatgtggaagaaaatcctggcccacatatgaccgagtacaagcccacggtgcgcctcgccacccgcgacgacgtccccagggccgtacgcaccctcgccgccgcgttcgccgactaccccgccacgcgccacaccgtcgatccggaccgccacatcgagcgggtcaccgagctgcaagaactcttcctcacgcgcgtcgggctcgacatcggcaaggtgtgggtcgcggacgacggcgccgcggtggcggtctggaccacgccggagagcgtcgaagcgggggcggtgttcgccgagatcggcccgcgcatggccgagttgagcggttcccggctggccgcgcagcaacagatggaaggcctcctggcgccgcaccggcccaaggagcccgcgtggttcctggccaccgtcggcgtctcgcccgaccaccagggcaagggtctgggcagcgccgtcgtgctccccggagtggaggcggccgagcgcgccggggtgcccgccttcctggagacctccgcgccccgcaacctccccttctacgagcggctcggcttcaccgtcaccgccgacgtcgaggtgcccgaaggaccgcgcacctggtgcatgacccgcaagcccggtgcctga

SEQ ID NO: 21948 - DNA, 27 bp, Artificial Sequence
  Synthetic Polynucleotide
ggggggggggggggggggggggggggg

SEQ ID NO: 21949 - DNA, 1992 bp, Artificial Sequence
  Synthetic Polynucleotide
atggccttaccagtgaccgccttgctcctgccgctggccttgctgctccacgccgccaggccgcagctccagctgcaagagtctggacctggcctggtcaagcctagcgagacactgagcctgacctgtaccgtgtccggcgatagcatcagcagcggcgattactactggggctggatcagacagcctcctggcaaaggactggaatggatcggccacatctactacagcggcgtgacctactacaaccccagcctgaagtccagagtgaccatcagcgtggacaccagccggaaccagttctccctgaagctgtctagcgtgacagccgccgataccgccgtgtactactgcaccagagaggacagcagcaactggcggagtagaggccagggaacactggtcacagttagctctctcgacagcggcggaggcggatctttcgaacagctccagttgcaagagagcggccctggcttggtaaaaccttccgagacccttagcctcacatgcacggttagtgggggcagcatttcctcaggtgattactattggggatggattcggcaacccccgggtaaaggattggagtggattggtcatatttattatagtggagcgacgtactacaacccaagtctcaaatccagggttacaatatccgtcgatacgagcaggaaccaattcagcttgaaactttctagtgtcaccgcagcagacacagccgtctattactgtacgcgggatgactccagtaattggcggtcccgagggcaagggacactggtcacggtctcctcaacgcgtgggtctggaggcggaggcagcggcggaggcgggagcggcttcaagatccccatcgaggaactggaagatcgggtgttcgtgaactgcaacacctctatcacctgggtggaaggcaccgtgggaacactgctgagcgacatcaccagactggacctcggcaagcggattctggaccctcggggcatctacagatgcaacggcaccgacatctacaaggacaaagaaagcaccgtgcaggtccactacagaatgtgccagtcctgcgtggaactggaccctgctacagtggccggcatcatcgtgaccgatgtgatcgctactctgctgctggctctgggagtgttctgcttcgccggacacgaaacaggcagactgtctggcgctgccgatacacaggccctgctgagaaacgaccaagtgtatcagcccctgcgcgacagagatgatgcccagtattctcacctcggcggcaactgggctagaaacaagagggccaagcgatctggatctggacaatgcactaattacgcattgctcaagctggccggtgacgttgagagtaatcctggcccctctagagaccatatgaccgagtacaagcccacggtgcgcctcgccacccgcgacgacgtccccagggccgtacgcaccctcgccgccgcgttcgccgactaccccgccacgcgccacaccgtcgatccggaccgccacatcgagcgggtcaccgagctgcaagaactcttcctcacgcgcgtcgggctcgacatcggcaaggtgtgggtcgcggacgacggcgccgcggtggcggtctggaccacgccggagagcgtcgaagcgggggcggtgttcgccgagatcggcccgcgcatggccgagttgagcggttcccggctggccgcgcagcaacagatggaaggcctcctggcgccgcaccggcccaaggagcccgcgtggttcctggccaccgtcggcgtctcgcccgaccaccagggcaagggtctgggcagcgccgtcgtgctccccggagtggaggcggccgagcgcgccggggtgcccgccttcctggagacctccgcgccccgcaacctccccttctacgagcggctcggcttcaccgtcaccgccgacgtcgaggtgcccgaaggaccgcgcacctggtgcatgacccgcaagcccggtgcctga

SEQ ID NO: 21950 - DNA, 2001 bp, Artificial Sequence
  Synthetic Polynucleotide
atggccttaccagtgaccgccttgctcctgccgctggccttgctgctccacgccgccaggccgcagctccagctgcaagagtctggacctggcctggtcaagcctagcgagacactgagcctgacctgtaccgtgtccggcgatagcatcagcagcggcgattactactggggctggatcagacagcctcctggcaaaggactggaatggatcggccacatctactacagcggcgtgacctactacaaccccagcctgaagtccagagtgaccatcagcgtggacaccagccggaaccagttctccctgaagctgtctagcgtgacagccgccgataccgccgtgtactactgcaccagagaggacagcagcaactggcggagtagaggccagggaacactggtcacagttagctctctcgagagcggcggaggcggatctttcgaagaggttcagctgcttgagtctggcggaggactggttcaacctggcggaagcctgagactgtcttgtgccgccagcggcttcacctttagcagctacgccatgagctgggtccgacaggctcctggcaaaggactggaatgggtgtccagcatcagcggcagcggcgactacatctactacgccgatagcgtgaagggcagattcaccatcagccgggacatcagcaagaacaccctgtacctccagatgaacagcctgagagccgaggacaccgccgtgtactactgtgccaaagaaggcaccggcgctaacagcagcctggccgattatagaggccagggcacactggtcaccgtgtctagtacgcgtgggtctggaggcggaggcagcggcggaggcgggagcggcttcaagatccccatcgaggaactggaagatcgggtgttcgtgaactgcaacacctctatcacctgggtggaaggcaccgtgggaacactgctgagcgacatcaccagactggacctcggcaagcggattctggaccctcggggcatctacagatgcaacggcaccgacatctacaaggacaaagaaagcaccgtgcaggtccactacagaatgtgccagtcctgcgtggaactggaccctgctacagtggccggcatcatcgtgaccgatgtgatcgctactctgctgctggctctgggagtgttctgcttcgccggacacgaaacaggcagactgtctggcgctgccgatacacaggccctgctgagaaacgaccaagtgtatcagcccctgcgcgacagagatgatgcccagtattctcacctcggcggcaactgggctagaaacaagagggccaagcgatctggatctggacaatgcactaattacgcattgctcaagctggccggtgacgttgagagtaatcctggcccctctagagaccatatgaccgagtacaagcccacggtgcgcctcgccacccgcgacgacgtccccagggccgtacgcaccctcgccgccgcgttcgccgactaccccgccacgcgccacaccgtcgatccggaccgccacatcgagcgggtcaccgagctgcaagaactcttcctcacgcgcgtcgggctcgacatcggcaaggtgtgggtcgcggacgacggcgccgcggtggcggtctggaccacgccggagagcgtcgaagcgggggcggtgttcgccgagatcggcccgcgcatggccgagttgagcggttcccggctggccgcgcagcaacagatggaaggcctcctggcgccgcaccggcccaaggagcccgcgtggttcctggccaccgtcggcgtctcgcccgaccaccagggcaagggtctgggcagcgccgtcgtgctccccggagtggaggcggccgagcgcgccggggtgcccgccttcctggagacctccgcgccccgcaacctccccttctacgagcggctcggcttcaccgtcaccgccgacgtcgaggtgcccgaaggaccgcgcacctggtgcatgacccgcaagcccggtgcctga

SEQ ID NO: 21951 - DNA, 1611 bp, Artificial Sequence
  Synthetic Polynucleotide
atggccttaccagtgaccgccttgctcctgccgctggccttgctgctccacgccgccaggccggaggtgcagctggttgaatctggcggaggactggttcagcctggcggatctctgagactgtcttgtgccgccagcggcttcaacatcaaggatacctgtatcggctgggttcgcagagcccctggcaaagaggaagaactggtcgccaaaatctgcaagtacagcggccacaccagatacgccgacagcgtgaagggcagattcaccatcagcgccgacaccagcaagaacaccgcctacctccagatgaacagcctgagagccgaggacaccgccgtgtactattgtgccgctgtgtccgtcagagatgggcactacaattactggggccagggcaccaccgtgaccgtttcttcaacgcgtgggtctggaggcggaggcagcggcggaggcgggagcggcttcaagatccccatcgaggaactggaagatcgggtgttcgtgaactgcaacacctctatcacctgggtggaaggcaccgtgggaacactgctgagcgacatcaccagactggacctcggcaagcggattctggaccctcggggcatctacagatgcaacggcaccgacatctacaaggacaaagaaagcaccgtgcaggtccactacagaatgtgccagtcctgcgtggaactggaccctgctacagtggccggcatcatcgtgaccgatgtgatcgctactctgctgctggctctgggagtgttctgcttcgccggacacgaaacaggcagactgtctggcgctgccgatacacaggccctgctgagaaacgaccaagtgtatcagcccctgcgcgacagagatgatgcccagtattctcacctcggcggcaactgggctagaaacaagagggccaagcgatctggatctggacaatgcactaattacgcattgctcaagctggccggtgacgttgagagtaatcctggcccctctagagaccatatgaccgagtacaagcccacggtgcgcctcgccacccgcgacgacgtccccagggccgtacgcaccctcgccgccgcgttcgccgactaccccgccacgcgccacaccgtcgatccggaccgccacatcgagcgggtcaccgagctgcaagaactcttcctcacgcgcgtcgggctcgacatcggcaaggtgtgggtcgcggacgacggcgccgcggtggcggtctggaccacgccggagagcgtcgaagcgggggcggtgttcgccgagatcggcccgcgcatggccgagttgagcggttcccggctggccgcgcagcaacagatggaaggcctcctggcgccgcaccggcccaaggagcccgcgtggttcctggccaccgtcggcgtctcgcccgaccaccagggcaagggtctgggcagcgccgtcgtgctccccggagtggaggcggccgagcgcgccggggtgcccgccttcctggagacctccgcgccccgcaacctccccttctacgagcggctcggcttcaccgtcaccgccgacgtcgaggtgcccgaaggaccgcgcacctggtgcatgacccgcaagcccggtgcctga

SEQ ID NO: 21952 - DNA, 2097 bp, Artificial Sequence
  Synthetic Polynucleotide
atggccttaccagtgaccgccttgctcctgccgctggccttgctgctccacgccgccaggccgcagctccagctgcaagagtctggacctggcctggtcaagcctagcgagacactgagcctgacctgtaccgtgtccggcgatagcatcagcagcggcgattactactggggctggatcagacagcctcctggcaaaggactggaatggatcggccacatctactacagcggcgtgacctactacaaccccagcctgaagtccagagtgaccatcagcgtggacaccagccggaaccagttctccctgaagctgtctagcgtgacagccgccgataccgccgtgtactactgcaccagagaggacagcagcaactggcggagtagaggccagggaacactggtcacagttagctctctcgacagcggcggaggcggatctttcgaacagctccagttgcaagagagcggccctggcttggtaaaaccttccgagacccttagcctcacatgcacggttagtgggggcagcatttcctcaggtgattactattggggatggattcggcaacccccgggtaaaggattggagtggattggtcatatttattatagtggagcgacgtactacaacccaagtctcaaatccagggttacaatatccgtcgatacgagcaggaaccaattcagcttgaaactttctagtgtcaccgcagcagacacagccgtctattactgtacgcgggatgactccagtaattggcggtcccgagggcaagggacactggtcacggtctcctcaacgcgtgggtctggaggcggaggcagcggcggaggcgggagcggcgacggtaacgaggagatgggaggaatcactcaaaccccttacaaagtctcaatttcaggaacaactgttatccttacatgtccccagtatcctggcagcgagatcctttggcagcataacgacaagaatatagggggagatgaagacgataagaatatcggatctgacgaggatcacttgagcctgaaagagttctccgagcttgaacaaagcggatattatgtgtgctatccgcgcgggtcaaagccggaagacgctaacttttacctttatctccgagccagagtgtgcgaaaattgcatggaaatggacgttatgtccgttgctacaatagttatcgtagatatatgcatcacgggtggactgcttctgctggtttattattggtccaagaatagaaaggccaaagctaaacccgtgaccagaggcgctggcgcaggcggaaggcaaaggggacaaaacaaagaacggccaccaccagtgccaaatccagattatgagcctattcggaaaggacagagggacctgtactctggcctgaatcagagaagaatcagggccaagcgatctggatctggacaatgcactaattacgcattgctcaagctggccggtgacgttgagagtaatcctggcccctctagagaccatatgaccgagtacaagcccacggtgcgcctcgccacccgcgacgacgtccccagggccgtacgcaccctcgccgccgcgttcgccgactaccccgccacgcgccacaccgtcgatccggaccgccacatcgagcgggtcaccgagctgcaagaactcttcctcacgcgcgtcgggctcgacatcggcaaggtgtgggtcgcggacgacggcgccgcggtggcggtctggaccacgccggagagcgtcgaagcgggggcggtgttcgccgagatcggcccgcgcatggccgagttgagcggttcccggctggccgcgcagcaacagatggaaggcctcctggcgccgcaccggcccaaggagcccgcgtggttcctggccaccgtcggcgtctcgcccgaccaccagggcaagggtctgggcagcgccgtcgtgctccccggagtggaggcggccgagcgcgccggggtgcccgccttcctggagacctccgcgccccgcaacctccccttctacgagcggctcggcttcaccgtcaccgccgacgtcgaggtgcccgaaggaccgcgcacctggtgcatgacccgcaagcccggtgcctga

SEQ ID NO: 21953 - DNA, 2106 bp, Artificial Sequence
  Synthetic Polynucleotide
atggccttaccagtgaccgccttgctcctgccgctggccttgctgctccacgccgccaggccgcagctccagctgcaagagtctggacctggcctggtcaagcctagcgagacactgagcctgacctgtaccgtgtccggcgatagcatcagcagcggcgattactactggggctggatcagacagcctcctggcaaaggactggaatggatcggccacatctactacagcggcgtgacctactacaaccccagcctgaagtccagagtgaccatcagcgtggacaccagccggaaccagttctccctgaagctgtctagcgtgacagccgccgataccgccgtgtactactgcaccagagaggacagcagcaactggcggagtagaggccagggaacactggtcacagttagctctctcgagagcggcggaggcggatctttcgaagaggttcagctgcttgagtctggcggaggactggttcaacctggcggaagcctgagactgtcttgtgccgccagcggcttcacctttagcagctacgccatgagctgggtccgacaggctcctggcaaaggactggaatgggtgtccagcatcagcggcagcggcgactacatctactacgccgatagcgtgaagggcagattcaccatcagccgggacatcagcaagaacaccctgtacctccagatgaacagcctgagagccgaggacaccgccgtgtactactgtgccaaagaaggcaccggcgctaacagcagcctggccgattatagaggccagggcacactggtcaccgtgtctagtacgcgtgggtctggaggcggaggcagcggcggaggcgggagcggcgacggtaacgaggagatgggaggaatcactcaaaccccttacaaagtctcaatttcaggaacaactgttatccttacatgtccccagtatcctggcagcgagatcctttggcagcataacgacaagaatatagggggagatgaagacgataagaatatcggatctgacgaggatcacttgagcctgaaagagttctccgagcttgaacaaagcggatattatgtgtgctatccgcgcgggtcaaagccggaagacgctaacttttacctttatctccgagccagagtgtgcgaaaattgcatggaaatggacgttatgtccgttgctacaatagttatcgtagatatatgcatcacgggtggactgcttctgctggtttattattggtccaagaatagaaaggccaaagctaaacccgtgaccagaggcgctggcgcaggcggaaggcaaaggggacaaaacaaagaacggccaccaccagtgccaaatccagattatgagcctattcggaaaggacagagggacctgtactctggcctgaatcagagaagaatcagggccaagcgatctggatctggacaatgcactaattacgcattgctcaagctggccggtgacgttgagagtaatcctggcccctctagagaccatatgaccgagtacaagcccacggtgcgcctcgccacccgcgacgacgtccccagggccgtacgcaccctcgccgccgcgttcgccgactaccccgccacgcgccacaccgtcgatccggaccgccacatcgagcgggtcaccgagctgcaagaactcttcctcacgcgcgtcgggctcgacatcggcaaggtgtgggtcgcggacgacggcgccgcggtggcggtctggaccacgccggagagcgtcgaagcgggggcggtgttcgccgagatcggcccgcgcatggccgagttgagcggttcccggctggccgcgcagcaacagatggaaggcctcctggcgccgcaccggcccaaggagcccgcgtggttcctggccaccgtcggcgtctcgcccgaccaccagggcaagggtctgggcagcgccgtcgtgctccccggagtggaggcggccgagcgcgccggggtgcccgccttcctggagacctccgcgccccgcaacctccccttctacgagcggctcggcttcaccgtcaccgccgacgtcgaggtgcccgaaggaccgcgcacctggtgcatgacccgcaagcccggtgcctga

SEQ ID NO: 21954 - DNA, 1992 bp, Artificial Sequence
  Synthetic Polynucleotide
atggccttaccagtgaccgccttgctcctgccgctggccttgctgctccacgccgccaggccgcagctccagctgcaagagtctggacctggcctggtcaagcctagcgagacactgagcctgacctgtaccgtgtccggcgatagcatcagcagcggcgattactactggggctggatcagacagcctcctggcaaaggactggaatggatcggccacatctactacagcggcgtgacctactacaaccccagcctgaagtccagagtgaccatcagcgtggacaccagccggaaccagttctccctgaagctgtctagcgtgacagccgccgataccgccgtgtactactgcaccagagaggacagcagcaactggcggagtagaggccagggaacactggtcacagttagctctctcgagagcggcggaggcggatctttcgaacagctccagttgcaagagagcggccctggcttggtaaaaccttccgagacccttagcctcacatgcacggttagtgggggcagcatttcctcaggtgattactattggggatggattcggcaacccccgggtaaaggattggagtggattggtcatatttattatagtggagcgacgtactacaacccaagtctcaaatccagggttacaatatccgtcgatacgagcaggaaccaattcagcttgaaactttctagtgtcaccgcagcagacacagccgtctattactgtacgcgggatgactccagtaattggcggtcccgagggcaagggacactggtcacggtctcctcaacgcgtgggtctggaggcggaggcagcggcggaggcgggagcggcttcaagatccccatcgaggaactggaagatcgggtgttcgtgaactgcaacacctctatcacctgggtggaaggcaccgtgggaacactgctgagcgacatcaccagactggacctcggcaagcggattctggaccctcggggcatctacagatgcaacggcaccgacatctacaaggacaaagaaagcaccgtgcaggtccactacagaatgtgccagtcctgcgtggaactggaccctgctacagtggccggcatcatcgtgaccgatgtgatcgctactctgctgctggctctgggagtgttctgcttcgccggacacgaaacaggcagactgtctggcgctgccgatacacaggccctgctgagaaacgaccaagtgtatcagcccctgcgcgacagagatgatgcccagtattctcacctcggcggcaactgggctagaaacaagagggccaagcgatctggatctggacaatgcactaattacgcattgctcaagctggccggtgacgttgagagtaatcctggcccctctagagaccatatgaccgagtacaagcccacggtgcgcctcgccacccgcgacgacgtccccagggccgtacgcaccctcgccgccgcgttcgccgactaccccgccacgcgccacaccgtcgatccggaccgccacatcgagcgggtcaccgagctgcaagaactcttcctcacgcgcgtcgggctcgacatcggcaaggtgtgggtcgcggacgacggcgccgcggtggcggtctggaccacgccggagagcgtcgaagcgggggcggtgttcgccgagatcggcccgcgcatggccgagttgagcggttcccggctggccgcgcagcaacagatggaaggcctcctggcgccgcaccggcccaaggagcccgcgtggttcctggccaccgtcggcgtctcgcccgaccaccagggcaagggtctgggcagcgccgtcgtgctccccggagtggaggcggccgagcgcgccggggtgcccgccttcctggagacctccgcgccccgcaacctccccttctacgagcggctcggcttcaccgtcaccgccgacgtcgaggtgcccgaaggaccgcgcacctggtgcatgacccgcaagcccggtgcctga

SEQ ID NO: 21955 - DNA, 1992 bp, Artificial Sequence
  Synthetic Polynucleotide
atggccttaccagtgaccgccttgctcctgccgctggccttgctgctccacgccgccaggccgcagctccagctgcaagagtctggacctggcctggtcaagcctagcgagacactgagcctgacctgtaccgtgtccggcgatagcatcagcagcggcgattactactggggctggatcagacagcctcctggcaaaggactggaatggatcggccacatctactacagcggcgtgacctactacaaccccagcctgaagtccagagtgaccatcagcgtggacaccagccggaaccagttctccctgaagctgtctagcgtgacagccgccgataccgccgtgtactactgcaccagagaggacagcagcaactggcggagtagaggccagggaacactggtcacagttagctctctcgagagcggcggaggcggatctttcgaacaggtgcagctggttgaatctggcggaggactggttcagcctggcggatctctgagactgtcttgtgccgccagcggcttcaccttcaccaatcacgccatgagctgggtccgacaggcccctggaaaaggactggaactggtgtctagcatcagcggcaacggcagaaccacctactacgccgatagcgtgaagggcagattcaccatcagccgggacatcagcaagaacaccctggacctccagatgaacagcctgagagccgaggataccgccgtgtactactgtgccaaggatggcggagagacactggtggatagcagaggccagggcacactggtcacagtgtcatctacgcgtgggtctggaggcggaggcagcggcggaggcgggagcggcttcaagatccccatcgaggaactggaagatcgggtgttcgtgaactgcaacacctctatcacctgggtggaaggcaccgtgggaacactgctgagcgacatcaccagactggacctcggcaagcggattctggaccctcggggcatctacagatgcaacggcaccgacatctacaaggacaaagaaagcaccgtgcaggtccactacagaatgtgccagtcctgcgtggaactggaccctgctacagtggccggcatcatcgtgaccgatgtgatcgctactctgctgctggctctgggagtgttctgcttcgccggacacgaaacaggcagactgtctggcgctgccgatacacaggccctgctgagaaacgaccaagtgtatcagcccctgcgcgacagagatgatgcccagtattctcacctcggcggcaactgggctagaaacaagagggccaagcgatctggatctggacaatgcactaattacgcattgctcaagctggccggtgacgttgagagtaatcctggcccctctagagaccatatgaccgagtacaagcccacggtgcgcctcgccacccgcgacgacgtccccagggccgtacgcaccctcgccgccgcgttcgccgactaccccgccacgcgccacaccgtcgatccggaccgccacatcgagcgggtcaccgagctgcaagaactcttcctcacgcgcgtcgggctcgacatcggcaaggtgtgggtcgcggacgacggcgccgcggtggcggtctggaccacgccggagagcgtcgaagcgggggcggtgttcgccgagatcggcccgcgcatggccgagttgagcggttcccggctggccgcgcagcaacagatggaaggcctcctggcgccgcaccggcccaaggagcccgcgtggttcctggccaccgtcggcgtctcgcccgaccaccagggcaagggtctgggcagcgccgtcgtgctccccggagtggaggcggccgagcgcgccggggtgcccgccttcctggagacctccgcgccccgcaacctccccttctacgagcggctcggcttcaccgtcaccgccgacgtcgaggtgcccgaaggaccgcgcacctggtgcatgacccgcaagcccggtgcctga

SEQ ID NO: 21956 - DNA, 1716 bp, Artificial Sequence
  Synthetic Polynucleotide
atggccttaccagtgaccgccttgctcctgccgctggccttgctgctccacgccgccaggccggaggtgcagctggttgaatctggcggaggactggttcagcctggcggatctctgagactgtcttgtgccgccagcggcttcaacatcaaggatacctgtatcggctgggttcgcagagcccctggcaaagaggaagaactggtcgccaaaatctgcaagtacagcggccacaccagatacgccgacagcgtgaagggcagattcaccatcagcgccgacaccagcaagaacaccgcctacctccagatgaacagcctgagagccgaggacaccgccgtgtactattgtgccgctgtgtccgtcagagatgggcactacaattactggggccagggcaccaccgtgaccgtttcttcaacgcgtgggtctggaggcggaggcagcggcggaggcgggagcggcgacggtaacgaggagatgggaggaatcactcaaaccccttacaaagtctcaatttcaggaacaactgttatccttacatgtccccagtatcctggcagcgagatcctttggcagcataacgacaagaatatagggggagatgaagacgataagaatatcggatctgacgaggatcacttgagcctgaaagagttctccgagcttgaacaaagcggatattatgtgtgctatccgcgcgggtcaaagccggaagacgctaacttttacctttatctccgagccagagtgtgcgaaaattgcatggaaatggacgttatgtccgttgctacaatagttatcgtagatatatgcatcacgggtggactgcttctgctggtttattattggtccaagaatagaaaggccaaagctaaacccgtgaccagaggcgctggcgcaggcggaaggcaaaggggacaaaacaaagaacggccaccaccagtgccaaatccagattatgagcctattcggaaaggacagagggacctgtactctggcctgaatcagagaagaatcagggccaagcgatctggatctggacaatgcactaattacgcattgctcaagctggccggtgacgttgagagtaatcctggcccctctagagaccatatgaccgagtacaagcccacggtgcgcctcgccacccgcgacgacgtccccagggccgtacgcaccctcgccgccgcgttcgccgactaccccgccacgcgccacaccgtcgatccggaccgccacatcgagcgggtcaccgagctgcaagaactcttcctcacgcgcgtcgggctcgacatcggcaaggtgtgggtcgcggacgacggcgccgcggtggcggtctggaccacgccggagagcgtcgaagcgggggcggtgttcgccgagatcggcccgcgcatggccgagttgagcggttcccggctggccgcgcagcaacagatggaaggcctcctggcgccgcaccggcccaaggagcccgcgtggttcctggccaccgtcggcgtctcgcccgaccaccagggcaagggtctgggcagcgccgtcgtgctccccggagtggaggcggccgagcgcgccggggtgcccgccttcctggagacctccgcgccccgcaacctccccttctacgagcggctcggcttcaccgtcaccgccgacgtcgaggtgcccgaaggaccgcgcacctggtgcatgacccgcaagcccggtgcctga

SEQ ID NO: 21957 - DNA, 1716 bp, Artificial Sequence; identical to SEQ ID NO: 21956
  Synthetic Polynucleotide

SEQ ID NO: 21958 - DNA, 2097 bp, Artificial Sequence
  Synthetic Polynucleotide
atggccttaccagtgaccgccttgctcctgccgctggccttgctgctccacgccgccaggccgcagctccagctgcaagagtctggacctggcctggtcaagcctagcgagacactgagcctgacctgtaccgtgtccggcgatagcatcagcagcggcgattactactggggctggatcagacagcctcctggcaaaggactggaatggatcggccacatctactacagcggcgtgacctactacaaccccagcctgaagtccagagtgaccatcagcgtggacaccagccggaaccagttctccctgaagctgtctagcgtgacagccgccgataccgccgtgtactactgcaccagagaggacagcagcaactggcggagtagaggccagggaacactggtcacagttagctctctcgagagcggcggaggcggatctttcgaacaggtgcagctggttgaatctggcggaggactggttcagcctggcggatctctgagactgtcttgtgccgccagcggcttcaccttcaccaatcacgccatgagctgggtccgacaggcccctggaaaaggactggaactggtgtctagcatcagcggcaacggcagaaccacctactacgccgatagcgtgaagggcagattcaccatcagccgggacatcagcaagaacaccctggacctccagatgaacagcctgagagccgaggataccgccgtgtactactgtgccaaggatggcggagagacactggtggatagcagaggccagggcacactggtcacagtgtcatctacgcgtgggtctggaggcggaggcagcggcggaggcgggagcggcgacggtaacgaggagatgggaggaatcactcaaaccccttacaaagtctcaatttcaggaacaactgttatccttacatgtccccagtatcctggcagcgagatcctttggcagcataacgacaagaatatagggggagatgaagacgataagaatatcggatctgacgaggatcacttgagcctgaaagagttctccgagcttgaacaaagcggatattatgtgtgctatccgcgcgggtcaaagccggaagacgctaacttttacctttatctccgagccagagtgtgcgaaaattgcatggaaatggacgttatgtccgttgctacaatagttatcgtagatatatgcatcacgggtggactgcttctgctggtttattattggtccaagaatagaaaggccaaagctaaacccgtgaccagaggcgctggcgcaggcggaaggcaaaggggacaaaacaaagaacggccaccaccagtgccaaatccagattatgagcctattcggaaaggacagagggacctgtactctggcctgaatcagagaagaatcagggccaagcgatctggatctggacaatgcactaattacgcattgctcaagctggccggtgacgttgagagtaatcctggcccctctagagaccatatgaccgagtacaagcccacggtgcgcctcgccacccgcgacgacgtccccagggccgtacgcaccctcgccgccgcgttcgccgactaccccgccacgcgccacaccgtcgatccggaccgccacatcgagcgggtcaccgagctgcaagaactcttcctcacgcgcgtcgggctcgacatcggcaaggtgtgggtcgcggacgacggcgccgcggtggcggtctggaccacgccggagagcgtcgaagcgggggcggtgttcgccgagatcggcccgcgcatggccgagttgagcggttcccggctggccgcgcagcaacagatggaaggcctcctggcgccgcaccggcccaaggagcccgcgtggttcctggccaccgtcggcgtctcgcccgaccaccagggcaagggtctgggcagcgccgtcgtgctccccggagtggaggcggccgagcgcgccggggtgcccgccttcctggagacctccgcgccccgcaacctccccttctacgagcggctcggcttcaccgtcaccgccgacgtcgaggtgcccgaaggaccgcgcacctggtgcatgacccgcaagcccggtgcctga

SEQ ID NO: 21959 - DNA, 2106 bp, Artificial Sequence
  Synthetic Polynucleotide
atggccttaccagtgaccgccttgctcctgccgctggccttgctgctccacgccgccaggccgcaggtgcagctggttgaatctggcggaggactggttcagcctggcggatctctgagactgtcttgtgccgccagcggcttcaccttcaccaatcacgccatgagctgggtccgacaggcccctggaaaaggactggaactggtgtctagcatcagcggcaacggcagaaccacctactacgccgatagcgtgaagggcagattcaccatcagccgggacatcagcaagaacaccctggacctccagatgaacagcctgagagccgaggataccgccgtgtactactgtgccaaggatggcggagagacactggtggatagcagaggccagggcacactggtcacagtgtcatctctcgagagcggcggaggcggatctttcgaagttcagctgcttgagtctggcggaggactggttcaacctggcggaagcctgagactgtcttgtgccgccagcggcttcatcttcagcagctacgccatgagctgggtccgacaggctcctggaaagggccaagaatgggtttccggcgttagcggcacaggcgtgaacacctactacgccgatagcgtgaagggcagattcaccatcagccgggacaacagcaagaacaccctgtacctccagatgaacagcctgagagccgaggacaccgccgtgtactattgtgcctctggcaaaggctgggacagcggctcttggtacgaggactatagaggccagggcaccctggtcacagtttcttcaacgcgtgggtctggaggcggaggcagcggcggaggcgggagcggcgacggtaacgaggagatgggaggaatcactcaaaccccttacaaagtctcaatttcaggaacaactgttatccttacatgtccccagtatcctggcagcgagatcctttggcagcataacgacaagaatatagggggagatgaagacgataagaatatcggatctgacgaggatcacttgagcctgaaagagttctccgagcttgaacaaagcggatattatgtgtgctatccgcgcgggtcaaagccggaagacgctaacttttacctttatctccgagccagagtgtgcgaaaattgcatggaaatggacgttatgtccgttgctacaatagttatcgtagatatatgcatcacgggtggactgcttctgctggtttattattggtccaagaatagaaaggccaaagctaaacccgtgaccagaggcgctggcgcaggcggaaggcaaaggggacaaaacaaagaacggccaccaccagtgccaaatccagattatgagcctattcggaaaggacagagggacctgtactctggcctgaatcagagaagaatcagggccaagcgatctggatctggacaatgcactaattacgcattgctcaagctggccggtgacgttgagagtaatcctggcccctctagagaccatatgaccgagtacaagcccacggtgcgcctcgccacccgcgacgacgtccccagggccgtacgcaccctcgccgccgcgttcgccgactaccccgccacgcgccacaccgtcgatccggaccgccacatcgagcgggtcaccgagctgcaagaactcttcctcacgcgcgtcgggctcgacatcggcaaggtgtgggtcgcggacgacggcgccgcggtggcggtctggaccacgccggagagcgtcgaagcgggggcggtgttcgccgagatcggcccgcgcatggccgagttgagcggttcccggctggccgcgcagcaacagatggaaggcctcctggcgccgcaccggcccaaggagcccgcgtggttcctggccaccgtcggcgtctcgcccgaccaccagggcaagggtctgggcagcgccgtcgtgctccccggagtggaggcggccgagcgcgccggggtgcccgccttcctggagacctccgcgccccgcaacctccccttctacgagcggctcggcttcaccgtcaccgccgacgtcgaggtgcccgaaggaccgcgcacctggtgcatgacccgcaagcccggtgcctga

SEQ ID NO: 21960 - DNA, 2115 bp, Artificial Sequence
  Synthetic Polynucleotide
atggccttaccagtgaccgccttgctcctgccgctggccttgctgctccacgccgccaggccggaggttcagctgcttgagtctggcggaggactggttcaacctggcggaagcctgagactgtcttgtgccgccagcggcttcacctttagcagctacgccatgagctgggtccgacaggctcctggcaaaggactggaatgggtgtccagcatcagcggcagcggcgactacatctactacgccgatagcgtgaagggcagattcaccatcagccgggacatcagcaagaacaccctgtacctccagatgaacagcctgagagccgaggacaccgccgtgtactactgtgccaaagaaggcaccggcgctaacagcagcctggccgattatagaggccagggcacactggtcaccgtgtctagtctcgagagcggcggaggcggatctttcgaagttcagctgcttgaaagcggtggcggcctggttcaacctggcggatctctgagactgagctgtgccgccagcggcttcatcttctccatctacgccatgtcctgggtccgacaggcccctggaaaaggactggaatgggtgtccggcatctctggcagcggcgtgaacacctactacgccgattctgtgaagggccgcttcatcatcagccgggacaacagcagaaacaccgtgtacctccagatgaacagcctgagagccgatgacaccgccgtgtaccactgcgccaatggcaaaggctgggacggcaacacttggtacgaggattacagaggacagggaaccctcgtgaccgtgtctagtacgcgtgggtctggaggcggaggcagcggcggaggcgggagcggcgacggtaacgaggagatgggaggaatcactcaaaccccttacaaagtctcaatttcaggaacaactgttatccttacatgtccccagtatcctggcagcgagatcctttggcagcataacgacaagaatatagggggagatgaagacgataagaatatcggatctgacgaggatcacttgagcctgaaagagttctccgagcttgaacaaagcggatattatgtgtgctatccgcgcgggtcaaagccggaagacgctaacttttacctttatctccgagccagagtgtgcgaaaattgcatggaaatggacgttatgtccgttgctacaatagttatcgtagatatatgcatcacgggtggactgcttctgctggtttattattggtccaagaatagaaaggccaaagctaaacccgtgaccagaggcgctggcgcaggcggaaggcaaaggggacaaaacaaagaacggccaccaccagtgccaaatccagattatgagcctattcggaaaggacagagggacctgtactctggcctgaatcagagaagaatcagggccaagcgatctggatctggacaatgcactaattacgcattgctcaagctggccggtgacgttgagagtaatcctggcccctctagagaccatatgaccgagtacaagcccacggtgcgcctcgccacccgcgacgacgtccccagggccgtacgcaccctcgccgccgcgttcgccgactaccccgccacgcgccacaccgtcgatccggaccgccacatcgagcgggtcaccgagctgcaagaactcttcctcacgcgcgtcgggctcgacatcggcaaggtgtgggtcgcggacgacggcgccgcggtggcggtctggaccacgccggagagcgtcgaagcgggggcggtgttcgccgagatcggcccgcgcatggccgagttgagcggttcccggctggccgcgcagcaacagatggaaggcctcctggcgccgcaccggcccaaggagcccgcgtggttcctggccaccgtcggcgtctcgcccgaccaccagggcaagggtctgggcagcgccgtcgtgctccccggagtggaggcggccgagcgcgccggggtgcccgccttcctggagacctccgcgccccgcaacctccccttctacgagcggctcggcttcaccgtcaccgccgacgtcgaggtgcccgaaggaccgcgcacctggtgcatgacccgcaagcccggtgcctga

SEQ ID NO: 21961 - DNA, 2106 bp, Artificial Sequence
  Synthetic Polynucleotide
atggccttaccagtgaccgccttgctcctgccgctggccttgctgctccacgccgccaggccgcaggtgcagctggttgaatctggcggaggactggttcagcctggcggatctctgagactgtcttgtgccgccagcggcttcaccttcaccaatcacgccatgagctgggtccgacaggcccctggaaaaggactggaactggtgtctagcatcagcggcaacggcagaaccacctactacgccgatagcgtgaagggcagattcaccatcagccgggacatcagcaagaacaccctggacctccagatgaacagcctgagagccgaggataccgccgtgtactactgtgccaaggatggcggagagacactggtggatagcagaggccagggcacactggtcacagtgtcatctctcgagagcggcggaggcggatctttcgaagttcagctgcttgaaagcggtggcggcctggttcaacctggcggatctctgagactgagctgtgccgccagcggcttcatcttctccatctacgccatgtcctgggtccgacaggcccctggaaaaggactggaatgggtgtccggcatctctggcagcggcgtgaacacctactacgccgattctgtgaagggccgcttcatcatcagccgggacaacagcagaaacaccgtgtacctccagatgaacagcctgagagccgatgacaccgccgtgtaccactgcgccaatggcaaaggctgggacggcaacacttggtacgaggattacagaggacagggaaccctcgtgaccgtgtctagtacgcgtgggtctggaggcggaggcagcggcggaggcgggagcggcgacggtaacgaggagatgggaggaatcactcaaaccccttacaaagtctcaatttcaggaacaactgttatccttacatgtccccagtatcctggcagcgagatcctttggcagcataacgacaagaatatagggggagatgaagacgataagaatatcggatctgacgaggatcacttgagcctgaaagagttctccgagcttgaacaaagcggatattatgtgtgctatccgcgcgggtcaaagccggaagacgctaacttttacctttatctccgagccagagtgtgcgaaaattgcatggaaatggacgttatgtccgttgctacaatagttatcgtagatatatgcatcacgggtggactgcttctgctggtttattattggtccaagaatagaaaggccaaagctaaacccgtgaccagaggcgctggcgcaggcggaaggcaaaggggacaaaacaaagaacggccaccaccagtgccaaatccagattatgagcctattcggaaaggacagagggacctgtactctggcctgaatcagagaagaatcagggccaagcgatctggatctggacaatgcactaattacgcattgctcaagctggccggtgacgttgagagtaatcctggcccctctagagaccatatgaccgagtacaagcccacggtgcgcctcgccacccgcgacgacgtccccagggccgtacgcaccctcgccgccgcgttcgccgactaccccgccacgcgccacaccgtcgatccggaccgccacatcgagcgggtcaccgagctgcaagaactcttcctcacgcgcgtcgggctcgacatcggcaaggtgtgggtcgcggacgacggcgccgcggtggcggtctggaccacgccggagagcgtcgaagcgggggcggtgttcgccgagatcggcccgcgcatggccgagttgagcggttcccggctggccgcgcagcaacagatggaaggcctcctggcgccgcaccggcccaaggagcccgcgtggttcctggccaccgtcggcgtctcgcccgaccaccagggcaagggtctgggcagcgccgtcgtgctccccggagtggaggcggccgagcgcgccggggtgcccgccttcctggagacctccgcgccccgcaacctccccttctacgagcggctcggcttcaccgtcaccgccgacgtcgaggtgcccgaaggaccgcgcacctggtgcatgacccgcaagcccggtgcctga

SEQ ID NO: 21962 - DNA, 2115 bp, Artificial Sequence
  Synthetic Polynucleotide
atggccttaccagtgaccgccttgctcctgccgctggccttgctgctccacgccgccaggccggaggttcagctgcttgagtctggcggaggactggttcaacctggcggaagcctgagactgtcttgtgccgccagcggcttcacctttagcagctacgccatgagctgggtccgacaggctcctggcaaaggactggaatgggtgtccagcatcagcggcagcggcgactacatctactacgccgatagcgtgaagggcagattcaccatcagccgggacatcagcaagaacaccctgtacctccagatgaacagcctgagagccgaggacaccgccgtgtactactgtgccaaagaaggcaccggcgctaacagcagcctggccgattatagaggccagggcacactggtcaccgtgtctagtctcgagagcggcggaggcggatctttcgaagttcagctgcttgagtctggcggaggactggttcaacctggcggaagcctgagactgtcttgtgccgccagcggcttcatcttcagcagctacgccatgagctgggtccgacaggctcctggaaagggccaagaatgggtttccggcgttagcggcacaggcgtgaacacctactacgccgatagcgtgaagggcagattcaccatcagccgggacaacagcaagaacaccctgtacctccagatgaacagcctgagagccgaggacaccgccgtgtactattgtgcctctggcaaaggctgggacagcggctcttggtacgaggactatagaggccagggcaccctggtcacagtttcttcaacgcgtgggtctggaggcggaggcagcggcggaggcgggagcggcgacggtaacgaggagatgggaggaatcactcaaaccccttacaaagtctcaatttcaggaacaactgttatccttacatgtccccagtatcctggcagcgagatcctttggcagcataacgacaagaatatagggggagatgaagacgataagaatatcggatctgacgaggatcacttgagcctgaaagagttctccgagcttgaacaaagcggatattatgtgtgctatccgcgcgggtcaaagccggaagacgctaacttttacctttatctccgagccagagtgtgcgaaaattgcatggaaatggacgttatgtccgttgctacaatagttatcgtagatatatgcatcacgggtggactgcttctgctggtttattattggtccaagaatagaaaggccaaagctaaacccgtgaccagaggcgctggcgcaggcggaaggcaaaggggacaaaacaaagaacggccaccaccagtgccaaatccagattatgagcctattcggaaaggacagagggacctgtactctggcctgaatcagagaagaatcagggccaagcgatctggatctggacaatgcactaattacgcattgctcaagctggccggtgacgttgagagtaatcctggcccctctagagaccatatgaccgagtacaagcccacggtgcgcctcgccacccgcgacgacgtccccagggccgtacgcaccctcgccgccgcgttcgccgactaccccgccacgcgccacaccgtcgatccggaccgccacatcgagcgggtcaccgagctgcaagaactcttcctcacgcgcgtcgggctcgacatcggcaaggtgtgggtcgcggacgacggcgccgcggtggcggtctggaccacgccggagagcgtcgaagcgggggcggtgttcgccgagatcggcccgcgcatggccgagttgagcggttcccggctggccgcgcagcaacagatggaaggcctcctggcgccgcaccggcccaaggagcccgcgtggttcctggccaccgtcggcgtctcgcccgaccaccagggcaagggtctgggcagcgccgtcgtgctccccggagtggaggcggccgagcgcgccggggtgcccgccttcctggagacctccgcgccccgcaacctccccttctacgagcggctcggcttcaccgtcaccgccgacgtcgaggtgcccgaaggaccgcgcacctggtgcatgacccgcaagcccggtgcctga

SEQ ID NO: 21963 - DNA, 2097 bp, Artificial Sequence
  Synthetic Polynucleotide
atggccttaccagtgaccgccttgctcctgccgctggccttgctgctccacgccgccaggccggaggtgcagctggttgaatctggcggaggactggttcagcctggcggatctctgagactgtcctgcacattttccggcggcaccttcagcagctacacaatgggctggttcagacaggcccctggcaaagaacgggaatttgtggccgaagtccgatggggcggagtgaccacatacagcaacagcctgaaggacagattcagcatcagcgaggacagcgtgaagaacgccgtgtacctccagatgaactccctgaagcctgaggacacagccgtgtactattgtgccgctgtgcggcagatgtacatgaccgtggtgcctgattattggggccagggcacactggtcacagtgtctagcagcggcggaggcggatctttcgaacagctccagttgcaagagagcggccctggcttggtaaaaccttccgagacccttagcctcacatgcacggttagtgggggcagcatttcctcaggtgattactattggggatggattcggcaacccccgggtaaaggattggagtggattggtcatatttattatagtggagcgacgtactacaacccaagtctcaaatccagggttacaatatccgtcgatacgagcaggaaccaattcagcttgaaactttctagtgtcaccgcagcagacacagccgtctattactgtacgcgggatgactccagtaattggcggtcccgagggcaagggacactggtcacggtctcctcaacgcgtgggtctggaggcggaggcagcggcggaggcgggagcggcgacggtaacgaggagatgggaggaatcactcaaaccccttacaaagtctcaatttcaggaacaactgttatccttacatgtccccagtatcctggcagcgagatcctttggcagcataacgacaagaatatagggggagatgaagacgataagaatatcggatctgacgaggatcacttgagcctgaaagagttctccgagcttgaacaaagcggatattatgtgtgctatccgcgcgggtcaaagccggaagacgctaacttttacctttatctccgagccagagtgtgcgaaaattgcatggaaatggacgttatgtccgttgctacaatagttatcgtagatatatgcatcacgggtggactgcttctgctggtttattattggtccaagaatagaaaggccaaagctaaacccgtgaccagaggcgctggcgcaggcggaaggcaaaggggacaaaacaaagaacggccaccaccagtgccaaatccagattatgagcctattcggaaaggacagagggacctgtactctggcctgaatcagagaagaatcagggccaagcgatctggatctggacaatgcactaattacgcattgctcaagctggccggtgacgttgagagtaatcctggcccctctagagaccatatgaccgagtacaagcccacggtgcgcctcgccacccgcgacgacgtccccagggccgtacgcaccctcgccgccgcgttcgccgactaccccgccacgcgccacaccgtcgatccggaccgccacatcgagcgggtcaccgagctgcaagaactcttcctcacgcgcgtcgggctcgacatcggcaaggtgtgggtcgcggacgacggcgccgcggtggcggtctggaccacgccggagagcgtcgaagcgggggcggtgttcgccgagatcggcccgcgcatggccgagttgagcggttcccggctggccgcgcagcaacagatggaaggcctcctggcgccgcaccggcccaaggagcccgcgtggttcctggccaccgtcggcgtctcgcccgaccaccagggcaagggtctgggcagcgccgtcgtgctccccggagtggaggcggccgagcgcgccggggtgcccgccttcctggagacctccgcgccccgcaacctccccttctacgagcggctcggcttcaccgtcaccgccgacgtcgaggtgcccgaaggaccgcgcacctggtgcatgacccgcaagcccggtgcctga

SEQ ID NO: 21964 - skipped

SEQ ID NO: 21965 - DNA, 1506 bp, Artificial Sequence
  Synthetic Polynucleotide
atggccttaccagtgaccgccttgctcctgccgctggccttgctgctccacgccgccaggccggacatccagatgacacagactacatcctccctgtctgcctctctgggagacagagtcaccatcagttgcagggcaagtcaggacattagtaaatatttaaattggtatcagcagaaaccagatggaactgttaaactcctgatctaccatacatcaagattacactcaggagtcccatcaaggttcagtggcagtgggtctggaacagattattctctcaccattagcaacctggagcaagaagatattgccacttacttttgccaacagggtaatacgcttccgtacacgttcggaggggggaccaagctggagatcacaggtggcggtggctcgggcggtggtgggtcgggtggcggcggatctgaggtgaaactgcaggagtcaggacctggcctggtggcgccctcacagagcctgtccgtcacatgcactgtctcaggggtctcattacccgactatggtgtaagctggattcgccagcctccacgaaagggtctggagtggctgggagtaatatggggtagtgaaaccacatactataattcagctctcaaatccagactgaccatcatcaaggacaactccaagagccaagttttcttaaaaatgaacagtctgcaaactgatgacacagccatttactactgtgccaaacattattactacggtggtagctatgctatggactactggggtcaaggaacctcagtcaccgtctcctcacgcgtagagcagaaactgatctcggaagaggatctggcgaagcccaccacgacgccagcgccgcgaccaccaacaccggcgcccaccatcgcgtcgcagcccctgtccctgcgcccagaggcgtgccggccagcggcggggggcgcagtgcacacgagggggctggacttcgcctgtgacatctacatctgggcgcccttggccgggacttgtggggtccttctcctgtcactggttatcaccctttactgcaaacggggcagaaagaaactcctgtatatattcaaacaaccatttatgagaccagtacaaactactcaagaggaagatggctgtagctgccgatttccagaagaagaagaaggaggatgtgaactgagagtgaagttcagcaggagcgcagacgcccccgcgtaccagcagggccagaaccagctctataacgagctgaatctaggacgaagagaggagtacgatgttttggacaagagacgtggccgggaccctgagatggggggaaagccgagaaggaagaaccctcaggaaggcctgtacaatgaactgcagaaagataagatggcggaggcctacagtgagattgggatgaaaggcgagcgccggaggggcaaggggcacgatggcctttaccagggtctcagtacagccaccaaggacacctacgacgcccttcacatgcaggccctgccccctcgctga

SEQ ID NO: 21966 - DNA, 1479 bp, Artificial Sequence
  Synthetic Polynucleotide
atggccttaccagtgaccgccttgctcctgccgctggccttgctgctccacgccgccaggccggacatccagatgacacagagccctagcagcctgtctgccagcgtgggagacagagtgaccatcacatgcaaggccagcgaccacatcaacaactggctggcctggtatcagcagaagcctggacaggcccctaagctgctgatctacggcgctaccacactggaaacaggcgtgcccagcagattttctggcagcggctctggcaccgactacaccctgacaatatccagcctccagcctgaggacttcgccacctactactgtcagcagagctggaacaccccttggacattcggccagggcaccaagctggaaatcaagagaggcggaggcggaagtggaggcggaggatctggcggcggaggctctcaagttcagcttcaacagcctggcgctgagctggtcaaacctggcgcttctgtgaagatgagctgcaaagccagcggctacgccttcagcagctactggatcaactggatgaagcagaaacccggccagggactcgaatggatcggccaaatctatcccggcgacggcgacaccaactacaacggcaagttcaagggcagagccacactgaccgccgatacctctagcagcacagcctacatgcagctgagcagcctgaccagcgaagatagcgccgtgtacttctgtgcccggtccatcacaacagtcgtgggctgcgctatggactattggggccagggaacaagcgtgaccgtgtctagtacgcgtaccacgacgccagcgccgcgaccaccaacaccggcgcccaccatcgcgtcgcagcccctgtccctgcgcccagaggcgtgccggccagcggcggggggcgcagtgcacacgagggggctggacttcgcctgtgacatctacatctgggcgcccttggccgggacttgtggggtccttctcctgtcactggttatcaccctttactgcaaacggggcagaaagaaactcctgtatatattcaaacaaccatttatgagaccagtacaaactactcaagaggaagatggctgtagctgccgatttccagaagaagaagaaggaggatgtgaactgagagtgaagttcagcaggagcgcagacgcccccgcgtaccagcagggccagaaccagctctataacgagctgaatctaggacgaagagaggagtacgatgttttggacaagagacgtggccgggaccctgagatggggggaaagccgagaaggaagaaccctcaggaaggcctgtacaatgaactgcagaaagataagatggcggaggcctacagtgagattgggatgaaaggcgagcgccggaggggcaaggggcacgatggcctttaccagggtctcagtacagccaccaaggacacctacgacgcccttcacatgcaggccctgccccctcgctaagtcgac

SEQ ID NO: 21967 - DNA, 2199 bp, Artificial Sequence; identical to SEQ ID NO: 9065
  Synthetic Polynucleotide

SEQ ID NO: 21968 - DNA, 2187 bp, Artificial Sequence; identical to SEQ ID NO: 8996
  Synthetic Polynucleotide

SEQ ID NO: 21969 - DNA, 1812 bp, Artificial Sequence
  Synthetic Polynucleotide
atggccttaccagtgaccgccttgctcctgccgctggccttgctgctccacgccgccaggccgttcgaacaagtcaaactggaagaaagcggtggcggcctggtgcaacctggcgaatctctgagactgagctgtagcgccagcggctccatcttcaaggtgttcagagtgttcgccatgagctggtacaggcaaggccctggcaagcagagagagctggtcgcctctatcagcagcggcgagacaaccacatacgccgaatctgtgaaaggccggttcaccatcagccgggataatgccaagaataccgcctatctccagatggactccctgaagcctgaagatacagctgtgtactactgcaacgccgaccataccttcaccggcgatttttggggccagggaacccaagtgaccgtgtctagtacgcgtgagcagaaactgatctcggaagaggatctggcgaagcccaccacgacgccagcgccgcgaccaccaacaccggcgcccaccatcgcgtcgcagcccctgtccctgcgcccagaggcgtgccggccagcggcggggggcgcagtgcacacgagggggctggacttcgcctgtgacatctacatctgggcgcccttggccgggacttgtggggtccttctcctgtcactggttatcaccctttactgcaaacggggcagaaagaaactcctgtatatattcaaacaaccatttatgagaccagtacaaactactcaagaggaagatggctgtagctgccgatttccagaagaagaagaaggaggatgtgaactgagagtgaagttcagcaggagcgcagacgcccccgcgtaccagcagggccagaaccagctctataacgagctgaatctaggacgaagagaggagtacgatgttttggacaagagacgtggccgggaccctgagatggggggaaagccgagaaggaagaaccctcaggaaggcctgtacaatgaactgcagaaagataagatggcggaggcctacagtgagattgggatgaaaggcgagcgccggaggggcaaggggcacgatggcctttaccagggtctcagtacagccaccaaggacacctacgacgcccttcacatgcaggccctgccccctcgctctagtggctccggcgagggcagaggaagtctactaacctgcggagatgtggaagaaaatcctggcccacatatgaccgagtacaagcccacggtgcgcctcgccacccgcgacgacgtccccagggccgtacgcaccctcgccgccgcgttcgccgactaccccgccacgcgccacaccgtcgatccggaccgccacatcgagcgggtcaccgagctgcaagaactcttcctcacgcgcgtcgggctcgacatcggcaaggtgtgggtcgcggacgacggcgccgcggtggcggtctggaccacgccggagagcgtcgaagcgggggcggtgttcgccgagatcggcccgcgcatggccgagttgagcggttcccggctggccgcgcagcaacagatggaaggcctcctggcgccgcaccggcccaaggagcccgcgtggttcctggccaccgtcggcgtctcgcccgaccaccagggcaagggtctgggcagcgccgtcgtgctccccggagtggaggcggccgagcgcgccggggtgcccgccttcctggagacctccgcgccccgcaacctccccttctacgagcggctcggcttcaccgtcaccgccgacgtcgaggtgcccgaaggaccgcgcacctggtgcatgacccgcaagcccggtgcctga

SEQ ID NO: 21970 - DNA, 2136 bp, Artificial Sequence
  Synthetic Polynucleotide
atggccttaccagtgaccgccttgctcctgccgctggccttgctgctccacgccgccaggccggagatcgtgctgacacagtctcccgccacactgtcactgtctccaggcgaaagagccacactgagctgtagagccagccagagcgtgtcctctagcctggcttggtatcagcagaagcctggacaggcccctcggctgctgatctacgatgccagcaatagagccacaggcatccccgccagattttctggctctggcagcggcaccgatttcaccctgaccataagcagcctggaacctgaggacttcgccgtgtactactgccagcagagaagcaactggcctccttacacattcggccagggcaccaaggtggaaatcaagagaggcggaggcggaagtggaggcggaggatctggcggcggaggctctcaagttcagctggttgagtctggcggcggagttgttcaacctggcagatccctgagactgtcctgtgccgccagcggctttacctttagcagctacggcatccactgggtccgacaggcacctggcaaaggactggaatgggttgccgtgatcggctacgacggcagcgacaagaattacgccgacagcgtgaagggcagattcaccatcttccgggacaacagcaagaacaccctgtacctccagatgaacagcctgagagccgaggacacagccgtgtattattgcgccagagatcagctgggcgacgcctttgatatttggggccagggaacaatggtcaccgtgtccagtacgcgtaccacgacgccagcgccgcgaccaccaacaccggcgcccaccatcgcgtcgcagcccctgtccctgcgcccagaggcgtgccggccagcggcggggggcgcagtgcacacgagggggctggacttcgcctgtgacatctacatctgggcgcccttggccgggacttgtggggtccttctcctgtcactggttatcaccctttactgcaaacggggcagaaagaaactcctgtatatattcaaacaaccatttatgagaccagtacaaactactcaagaggaagatggctgtagctgccgatttccagaagaagaagaaggaggatgtgaactgagagtgaagttcagcaggagcgcagacgcccccgcgtaccagcagggccagaaccagctctataacgagctgaatctaggacgaagagaggagtacgatgttttggacaagagacgtggccgggaccctgagatggggggaaagccgagaaggaagaaccctcaggaaggcctgtacaatgaactgcagaaagataagatggcggaggcctacagtgagattgggatgaaaggcgagcgccggaggggcaaggggcacgatggcctttaccagggtctcagtacagccaccaaggacacctacgacgcccttcacatgcaggccctgccccctcgctctagtggctccggcgagggcagaggaagtctactaacctgcggagatgtggaagaaaatcctggcccacatatgaccgagtacaagcccacggtgcgcctcgccacccgcgacgacgtccccagggccgtacgcaccctcgccgccgcgttcgccgactaccccgccacgcgccacaccgtcgatccggaccgccacatcgagcgggtcaccgagctgcaagaactcttcctcacgcgcgtcgggctcgacatcggcaaggtgtgggtcgcggacgacggcgccgcggtggcggtctggaccacgccggagagcgtcgaagcgggggcggtgttcgccgagatcggcccgcgcatggccgagttgagcggttcccggctggccgcgcagcaacagatggaaggcctcctggcgccgcaccggcccaaggagcccgcgtggttcctggccaccgtcggcgtctcgcccgaccaccagggcaagggtctgggcagcgccgtcgtgctccccggagtggaggcggccgagcgcgccggggtgcccgccttcctggagacctccgcgccccgcaacctccccttctacgagcggctcggcttcaccgtcaccgccgacgtcgaggtgcccgaaggaccgcgcacctggtgcatgacccgcaagcccggtgcctga

SEQ ID NO: 21971 - DNA, 2139 bp, Artificial Sequence
  Synthetic Polynucleotide
atggccttaccagtgaccgccttgctcctgccgctggccttgctgctccacgccgccaggccggacatcctgctgacacagagccctgccatcctgagtgtgtctccaggcgagagagtgtccttcagctgtagaaccagccagagcatcggcaccaacatccactggtatcagcagcggaccaacggcttccccagactgctgattaagaacgtgtccgagagcatcagcggcatccccagcagattttctggctctggcagcggcaccgacttcatcctgagcatcaacagcgtggaaagcgaggacattgccgactactactgccagcagagcaacacctggcctttcacctttggcggaggcaccaagctggaaatcaaaggcggaggcggaagtggaggcggaggatctggcggcggaggctctcaggttcagctccagcagcctgtgacagagcttgtcagacctggcgcttccgtgatgctgtcttgcaaggccagcgactaccccttcaccaactactggattcactgggtcaagcagcggccaggccaaggactggaatggatcggagtgatcgaccccagcgacacataccccaactacaacaagaagttcaagggcaaagccacactgaccgtggtggtgtctagcagcacagcctacatgcagctgagcagcctgacctccgatgacagcgccgtgtactactgcgccagaaacggcgacagcgattactacagcggcatggactattggggccagggcacaagcgtgaccgttagctctacgcgtaccacgacgccagcgccgcgaccaccaacaccggcgcccaccatcgcgtcgcagcccctgtccctgcgcccagaggcgtgccggccagcggcggggggcgcagtgcacacgagggggctggacttcgcctgtgacatctacatctgggcgcccttggccgggacttgtggggtccttctcctgtcactggttatcaccctttactgcaaacggggcagaaagaaactcctgtatatattcaaacaaccatttatgagaccagtacaaactactcaagaggaagatggctgtagctgccgatttccagaagaagaagaaggaggatgtgaactgagagtgaagttcagcaggagcgcagacgcccccgcgtaccagcagggccagaaccagctctataacgagctgaatctaggacgaagagaggagtacgatgttttggacaagagacgtggccgggaccctgagatggggggaaagccgagaaggaagaaccctcaggaaggcctgtacaatgaactgcagaaagataagatggcggaggcctacagtgagattgggatgaaaggcgagcgccggaggggcaaggggcacgatggcctttaccagggtctcagtacagccaccaaggacacctacgacgcccttcacatgcaggccctgccccctcgctctagtggctccggcgagggcagaggaagtctactaacctgcggagatgtggaagaaaatcctggcccacatatgaccgagtacaagcccacggtgcgcctcgccacccgcgacgacgtccccagggccgtacgcaccctcgccgccgcgttcgccgactaccccgccacgcgccacaccgtcgatccggaccgccacatcgagcgggtcaccgagctgcaagaactcttcctcacgcgcgtcgggctcgacatcggcaaggtgtgggtcgcggacgacggcgccgcggtggcggtctggaccacgccggagagcgtcgaagcgggggcggtgttcgccgagatcggcccgcgcatggccgagttgagcggttcccggctggccgcgcagcaacagatggaaggcctcctggcgccgcaccggcccaaggagcccgcgtggttcctggccaccgtcggcgtctcgcccgaccaccagggcaagggtctgggcagcgccgtcgtgctccccggagtggaggcggccgagcgcgccggggtgcccgccttcctggagacctccgcgccccgcaacctccccttctacgagcggctcggcttcaccgtcaccgccgacgtcgaggtgcccgaaggaccgcgcacctggtgcatgacccgcaagcccggtgcctga

SEQ ID NO: 21972 - DNA, 2139 bp, Artificial Sequence
  Synthetic Polynucleotide
atggccttaccagtgaccgccttgctcctgccgctggccttgctgctccacgccgccaggccggagatcgtgctgacacagtctcccgccacactgtcactgtctccaggcgaaagagccacactgagctgtagagccagccagagcgtgacaagctacctggcctggtatcagcagaagcctggacaggctccccggctgctgatctacgatgccagcaatagagccacaggcatccccgccagattttctggctctggcagcagaaccgacttcaccctgaccataagcagcctggaacctgaggacttcgccgtgtactactgccagcagagaagcaactggccccacctgacatttggcggaggcaccaaggtggaaatcaagagaggcggaggcggaagtggaggcggaggatctggcggcggaggctctcaagttcagctggttgaatcaggcggaggcgttgtgcaacctggcagatccctgagactgtcttgtgccgccagcggcttcaccttcagcacctatggaatgcactgggtccgacaggcccctggcaaaggacttgaatgggtcgccgtgatctcccacgacggcagcgataagtattacgccgacagcgtgaagggcagattcaccatcagccgggacaacagcaagaacaccctgtacctccagatgaacagcctgagagccgaggacacagccgtgtattattgcgccagagatcagagcatcatcgagacattcgactactggggccagggcaccctggtcacagtttcttctacgcgtaccacgacgccagcgccgcgaccaccaacaccggcgcccaccatcgcgtcgcagcccctgtccctgcgcccagaggcgtgccggccagcggcggggggcgcagtgcacacgagggggctggacttcgcctgtgacatctacatctgggcgcccttggccgggacttgtggggtccttctcctgtcactggttatcaccctttactgcaaacggggcagaaagaaactcctgtatatattcaaacaaccatttatgagaccagtacaaactactcaagaggaagatggctgtagctgccgatttccagaagaagaagaaggaggatgtgaactgagagtgaagttcagcaggagcgcagacgcccccgcgtaccagcagggccagaaccagctctataacgagctgaatctaggacgaagagaggagtacgatgttttggacaagagacgtggccgggaccctgagatggggggaaagccgagaaggaagaaccctcaggaaggcctgtacaatgaactgcagaaagataagatggcggaggcctacagtgagattgggatgaaaggcgagcgccggaggggcaaggggcacgatggcctttaccagggtctcagtacagccaccaaggacacctacgacgcccttcacatgcaggccctgccccctcgctctagtggctccggcgagggcagaggaagtctactaacctgcggagatgtggaagaaaatcctggcccacatatgaccgagtacaagcccacggtgcgcctcgccacccgcgacgacgtccccagggccgtacgcaccctcgccgccgcgttcgccgactaccccgccacgcgccacaccgtcgatccggaccgccacatcgagcgggtcaccgagctgcaagaactcttcctcacgcgcgtcgggctcgacatcggcaaggtgtgggtcgcggacgacggcgccgcggtggcggtctggaccacgccggagagcgtcgaagcgggggcggtgttcgccgagatcggcccgcgcatggccgagttgagcggttcccggctggccgcgcagcaacagatggaaggcctcctggcgccgcaccggcccaaggagcccgcgtggttcctggccaccgtcggcgtctcgcccgaccaccagggcaagggtctgggcagcgccgtcgtgctccccggagtggaggcggccgagcgcgccggggtgcccgccttcctggagacctccgcgccccgcaacctccccttctacgagcggctcggcttcaccgtcaccgccgacgtcgaggtgcccgaaggaccgcgcacctggtgcatgacccgcaagcccggtgcctga

SEQ ID NO: 21973 - DNA, 27 bp, Artificial Sequence
  Synthetic Polynucleotide
ggggggggggggggggggggggggggg

SEQ ID NO: 21974 - DNA, 3447 bp, Artificial Sequence
  Synthetic Polynucleotide
atggccttaccagtgaccgccttgctcctgccgctggccttgctgctccacgccgccaggccggacgagatcgtgctgacacagagccccgccaccctgtcactgtctccaggcgaaagagccaccctgagctgtagcgccagcagcagcgtgtcctacatgcactggtatcagcagaagcccggccaggcccccagactgctgatctacgataccagcaagctggcctccggcatccccgccagattttctggcagcggctccggcaccgacttcaccctgacaatcagcagcctggaacccgaggacgtggccgtgtactactgttttcaaggcagcgtgtaccccttcaccttcggccagggcaccaagctggaaatcaagagaggtggcggtggctcgggcggtggtgggtcgggtggcggcggatctcaggtgcagctccaggaatctggccctggcctcgtgaagcctagccagaccctgagcctgacctgtaccgtgtctggcggcagcatcagcacaagcggcatgggcgtgggctggatcagacagcaccctggcaagggcctggaatggatcggccacatttggtgggacgacgacaagcggtacaaccccgccctgaagtccagagtgaccatcagcgtggacaccagcaagaaccagttcagcctgaagctgagcagcgtgacagccgccgataccgccgtgtattattgcgcccggatggaactgtggtcctactacttcgactactggggccagggaaccctcgtgaccgtgtctagtctcgaggggaaaccaattcccaaccctcttctgggactggattcaaccggcagcggcgaggacctgaagaacgtgttcccacctgaggtggccgtgttcgagcctagcaaggccgagatcgcccacacccagaaagccaccctcgtgtgcctggctaccggcttctaccccgaccatgtggaactgtcttggtgggtcaacggcaaagaggtgcacagcggcgtgtgtaccgacccccagccactgaaagaacagcccgccctgaacgacagccggtactgcctgagcagcagactgagagtgtccgccaccttctggcagaacccccggaaccacttcagatgccaggtgcagttctacggcctgagcgagaacgacgagtggacccaggacagagccaagcccgtgacccagatcgtgtctgccgaagcctggggcagagccgattgcggcatcaccagcgccagctaccaccagggcgtgctgagcgccaccatcctgtacgagatcctgctgggcaaggccaccctgtacgccgtgctggtgtctgccctggtgctgatggctatggtcaagcggaaggacagccggggaagggccaagcgatctggatctggagcaacaaacttctcactactcaaacaagcaggtgacgtggaggagaatcccgggcctactagcatggccttaccagtgaccgccttgctcctgccgctggccttgctgctccacgccgccaggccggacatcgtgatgacccagagccccgatagcctggccgtgtctctgggagagagagccaccatcaactgcgagagcagccagagcctgctgaacagcggcaaccagaagaactacctgacctggtatcagcagaagcccggccagccccccaagcccctgatctattgggccagcaccagagaaagcggcgtgcccgatagattcagcggcagcggaagcggcaccgacttcaccctgaccatcagttctcttcaggccgaggacgtggccgtgtactactgccagaacgactacagctacccctacaccttcggccagggcaccaagctggaaatcaagagaggcggaggcggaagtggaggcggaggatctggcggcggaggctctgaagtgcagctggtgcagtctggggccgaagtgaagaagcctggcgagagcctgaagatcagctgcaagggcagcggctacagcttcaccgactactacatgaagtgggccagacagatgcccggcaagggcctggaatggatgggcgacatcatccccagcaacggggccaccttctacaaccagaaattcaagggccaagtgaccatctccgccgacaagagcatcagcaccacctacctccagtggtccagcctgaaggccagcgacaccgccatgtactattgcgccagaagccatctgctgcgggccagttggttcgcctattggggccagggaacaatggtcacagtgtccagcacgcgtgagcagaaactgatctcggaagaggatgggagcggcatccagaaccctgatcctgccgtgtaccagctgcgggatagcaagagcagcgacaagagcgtgtgtctgttcaccgacttcgacagccagaccaacgtgtcccagagcaaggactccgacgtgtacatcaccgataagtgcgtgctggacatgcggagcatggacttcaagagcaactccgccgtggcctggtccaacaagtccgatttcgcctgcgccaacgccttcaacaacagcattatccccgaggacacattcttcccaagcagcgacgtgccctgcgacgtgaagctggtggaaaagagcttcgagacagacaccaacctgaacttccagaacctgagcgtgatcggcttcagaatcctgctgctgaaagtggccggctttaacctgctgatgaccctgcggctgtggtccagccgcgccaagagaagcggatctggcgtgaagcagaccctgaatttcgacctgctgaagctggctggcgacgtggaatccaacccaggcccttctagaggccatatgaccgagtacaagcccacggtgcgcctcgccacccgcgacgacgtccccagggccgtacgcaccctcgccgccgcgttcgccgactaccccgccacgcgccacaccgtcgatccggaccgccacatcgagcgggtcaccgagctgcaagaactcttcctcacgcgcgtcgggctcgacatcggcaaggtgtgggtcgcggacgacggcgccgcggtggcggtctggaccacgccggagagcgtcgaagcgggggcggtgttcgccgagatcggcccgcgcatggccgagttgagcggttcccggctggccgcgcagcaacagatggaaggcctcctggcgccgcaccggcccaaggagcccgcgtggttcctggccaccgtcggcgtctcgcccgaccaccagggcaagggtctgggcagcgccgtcgtgctccccggagtggaggcggccgagcgcgccggggtgcccgccttcctggagacctccgcgccccgcaacctccccttctacgagcggctcggcttcaccgtcaccgccgacgtcgaggtgcccgaaggaccgcgcacctggtgcatgacccgcaagcccggtgcctga

SEQ ID NO: 21975 - DNA, 3444 bp, Artificial Sequence
  Synthetic Polynucleotide
atggccttaccagtgaccgccttgctcctgccgctggccttgctgctccacgccgccaggccgctcgaggggaaaccaattcccaaccctcttctgggactggattcaaccggcagcggcgaggacctgaagaacgtgttcccacctgaggtggccgtgttcgagcctagcaaggccgagatcgcccacacccagaaagccaccctcgtgtgcctggctaccggcttctaccccgaccatgtggaactgtcttggtgggtcaacggcaaagaggtgcacagcggcgtgtgtaccgacccccagccactgaaagaacagcccgccctgaacgacagccggtactgcctgagcagcagactgagagtgtccgccaccttctggcagaacccccggaaccacttcagatgccaggtgcagttctacggcctgagcgagaacgacgagtggacccaggacagagccaagcccgtgacccagatcgtgtctgccgaagcctggggcagagccgattgcggcatcaccagcgccagctaccaccagggcgtgctgagcgccaccatcctgtacgagatcctgctgggcaaggccaccctgtacgccgtgctggtgtctgccctggtgctgatggctatggtcaagcggaaggacagccggggaagggccaagcgatctggatctggagcaacaaacttctcactactcaaacaagcaggtgacgtggaggagaatcccgggcctactagcatggccttaccagtgaccgccttgctcctgccgctggccttgctgctccacgccgccaggccggaccagatcgtgctgacccagtcccccgctattatgtccgcatcaccgggcgaaaaagtgacgatctcctgtagcgcttcatctagcgtctcctacatgtattggtatcaacagaaacctgggtctagcccaaagccgtggatctacagaaccagtaaccttgccagtggggtgccagcccgcttcagcggtagtggcagtggaacttcctatagcctcacaataagcaacatggaggctgaagatgccgctgcctattactgccagcagtaccacagttacccaaccacgttcggcgggggaactaagctcgaagtaaaaggcggaggcggaagtggaggcggaggatctggcggcggaggctctgaggtgcagctggtggaatctgggggcggcctggtccaacctaagggatcactcaagctctcttgtgcggccagcggattctctttcaatacctatgctatgaattgggtgagacaggcgcccggaaagggcctcgaatggatagcccatatccggtcaaaatcaaacaatttcgcaacctactatgcggactccgtgaaggaccgattttccatctcccgagatgcctccgagaatattctgttcctgcagatgaataacctcaagacagaggacaccgccatgtactactgtgtgcgccagggcggtgactttcccatggattactgggggcaggggaccagcgtgaccgtgagctctacgcgtgaagccgcagcaaaggagatcgtgctgacacagagccccgccaccctgtcactgtctccaggcgaaagagccaccctgagctgtagcgccagcagcagcgtgtcctacatgcactggtatcagcagaagcccggccaggcccccagactgctgatctacgataccagcaagctggcctccggcatccccgccagattttctggcagcggctccggcaccgacttcaccctgacaatcagcagcctggaacccgaggacgtggccgtgtactactgttttcaaggcagcgtgtaccccttcaccttcggccagggcaccaagctggaaatcaagagaggtggcggtggctcgggcggtggtgggtcgggtggcggcggatctcaggtgcagctccaggaatctggccctggcctcgtgaagcctagccagaccctgagcctgacctgtaccgtgtctggcggcagcatcagcacaagcggcatgggcgtgggctggatcagacagcaccctggcaagggcctggaatggatcggccacatttggtgggacgacgacaagcggtacaaccccgccctgaagtccagagtgaccatcagcgtggacaccagcaagaaccagttcagcctgaagctgagcagcgtgacagccgccgataccgccgtgtattattgcgcccggatggaactgtggtcctactacttcgactactggggccagggaaccctcgtgaccgtgtctagtacgcgtgagcagaaactgatctcggaagaggatgggagcggcatccagaaccctgatcctgccgtgtaccagctgcgggatagcaagagcagcgacaagagcgtgtgtctgttcaccgacttcgacagccagaccaacgtgtcccagagcaaggactccgacgtgtacatcaccgataagtgcgtgctggacatgcggagcatggacttcaagagcaactccgccgtggcctggtccaacaagtccgatttcgcctgcgccaacgccttcaacaacagcattatccccgaggacacattcttcccaagcagcgacgtgccctgcgacgtgaagctggtggaaaagagcttcgagacagacaccaacctgaacttccagaacctgagcgtgatcggcttcagaatcctgctgctgaaagtggccggctttaacctgctgatgaccctgcggctgtggtccagccgcgccaagagaagcggatctggcgtgaagcagaccctgaatttcgacctgctgaagctggctggcgacgtggaatccaacccaggcccttctagaggccatatgaccgagtacaagcccacggtgcgcctcgccacccgcgacgacgtccccagggccgtacgcaccctcgccgccgcgttcgccgactaccccgccacgcgccacaccgtcgatccggaccgccacatcgagcgggtcaccgagctgcaagaactcttcctcacgcgcgtcgggctcgacatcggcaaggtgtgggtcgcggacgacggcgccgcggtggcggtctggaccacgccggagagcgtcgaagcgggggcggtgttcgccgagatcggcccgcgcatggccgagttgagcggttcccggctggccgcgcagcaacagatggaaggcctcctggcgccgcaccggcccaaggagcccgcgtggttcctggccaccgtcggcgtctcgcccgaccaccagggcaagggtctgggcagcgccgtcgtgctccccggagtggaggcggccgagcgcgccggggtgcccgccttcctggagacctccgcgccccgcaacctccccttctacgagcggctcggcttcaccgtcaccgccgacgtcgaggtgcccgaaggaccgcgcacctggtgcatgacccgcaagcccggtgcctga

SEQ ID NO: 21976 - DNA, 3444 bp, Artificial Sequence
  Synthetic Polynucleotide
atggccttaccagtgaccgccttgctcctgccgctggccttgctgctccacgccgccaggccgctcgaggggaaaccaattcccaaccctcttctgggactggattcaaccggcagcggcgaggacctgaagaacgtgttcccacctgaggtggccgtgttcgagcctagcaaggccgagatcgcccacacccagaaagccaccctcgtgtgcctggctaccggcttctaccccgaccatgtggaactgtcttggtgggtcaacggcaaagaggtgcacagcggcgtgtgtaccgacccccagccactgaaagaacagcccgccctgaacgacagccggtactgcctgagcagcagactgagagtgtccgccaccttctggcagaacccccggaaccacttcagatgccaggtgcagttctacggcctgagcgagaacgacgagtggacccaggacagagccaagcccgtgacccagatcgtgtctgccgaagcctggggcagagccgattgcggcatcaccagcgccagctaccaccagggcgtgctgagcgccaccatcctgtacgagatcctgctgggcaaggccaccctgtacgccgtgctggtgtctgccctggtgctgatggctatggtcaagcggaaggacagccggggaagggccaagcgatctggatctggagcaacaaacttctcactactcaaacaagcaggtgacgtggaggagaatcccgggcctactagcaccatggccttaccagtgaccgccttgctcctgccgctggccttgctgctccacgccgccaggccggacatccagatgacccagagccccagcagcctgtctgccagcgtgggcgacagagtgaccatcacatgcaaggccagccaggacgtgggaatcgccgtggcctggtatcagcagaaacccggcaaggtgcccaagctgctgatctactgggccagcaccagacacaccggcgtgcccgatagattttccggcagcggctccggcaccgacttcaccctgacaatcagctccctccagcccgaggacgtggcaacctactactgccagcagtacagcagctacccctacaccttcggccagggcaccaaggtggaaatcaagggcggaggcggaagtggaggcggaggatctggcggcggaggctctgaagtgcaactggtggaatcaggcggcggactggtgcagcctggcggatctctgagactgagctgtgccgccagcggcttcgacttcagccggtactggatgagctgggtgcgccaggcccctggcaaaggactggaatggatcggcgagatcaaccccgacagcagcaccatcaactacgcccccagcctgaaggacaagttcatcatcagccgggacaacgccaagaacagcctgtacctccagatgaactccctgcgggccgaggacaccgccgtgtactattgcgccagacccgacggcaactactggtacttcgacgtgtggggccagggaaccctcgtgaccgtgtcatctacgcgtgaagccgcagcaaaggagatcgtgctgacacagagccccgccaccctgtcactgtctccaggcgaaagagccaccctgagctgtagcgccagcagcagcgtgtcctacatgcactggtatcagcagaagcccggccaggcccccagactgctgatctacgataccagcaagctggcctccggcatccccgccagattttctggcagcggctccggcaccgacttcaccctgacaatcagcagcctggaacccgaggacgtggccgtgtactactgttttcaaggcagcgtgtaccccttcaccttcggccagggcaccaagctggaaatcaagagaggtggcggtggctcgggcggtggtgggtcgggtggcggcggatctcaggtgcagctccaggaatctggccctggcctcgtgaagcctagccagaccctgagcctgacctgtaccgtgtctggcggcagcatcagcacaagcggcatgggcgtgggctggatcagacagcaccctggcaagggcctggaatggatcggccacatttggtgggacgacgacaagcggtacaaccccgccctgaagtccagagtgaccatcagcgtggacaccagcaagaaccagttcagcctgaagctgagcagcgtgacagccgccgataccgccgtgtattattgcgcccggatggaactgtggtcctactacttcgactactggggccagggaaccctcgtgaccgtgtctagtacgcgtgagcagaaactgatctcggaagaggatgggagcggcatccagaaccctgatcctgccgtgtaccagctgcgggatagcaagagcagcgacaagagcgtgtgtctgttcaccgacttcgacagccagaccaacgtgtcccagagcaaggactccgacgtgtacatcaccgataagtgcgtgctggacatgcggagcatggacttcaagagcaactccgccgtggcctggtccaacaagtccgatttcgcctgcgccaacgccttcaacaacagcattatccccgaggacacattcttcccaagcagcgacgtgccctgcgacgtgaagctggtggaaaagagcttcgagacagacaccaacctgaacttccagaacctgagcgtgatcggcttcagaatcctgctgctgaaagtggccggctttaacctgctgatgaccctgcggctgtggtccagccgcgccaagagaagcggatctggcgtgaagcagaccctgaatttcgacctgctgaagctggctggcgacgtggaatccaacccaggcccttctagaggccatatgaccgagtacaagcccacggtgcgcctcgccacccgcgacgacgtccccagggccgtacgcaccctcgccgccgcgttcgccgactaccccgccacgcgccacaccgtcgatccggaccgccacatcgagcgggtcaccgagctgcaagaactcttcctcacgcgcgtcgggctcgacatcggcaaggtgtgggtcgcggacgacggcgccgcggtggcggtctggaccacgccggagagcgtcgaagcgggggcggtgttcgccgagatcggcccgcgcatggccgagttgagcggttcccggctggccgcgcagcaacagatggaaggcctcctggcgccgcaccggcccaaggagcccgcgtggttcctggccaccgtcggcgtctcgcccgaccaccagggcaagggtctgggcagcgccgtcgtgctccccggagtggaggcggccgagcgcgccggggtgcccgccttcctggagacctccgcgccccgcaacctccccttctacgagcggctcggcttcaccgtcaccgccgacgtcgaggtgcccgaaggaccgcgcacctggtgcatgacccgcaagcccggtgcctga

SEQ ID NO: 21977 - DNA, 3456 bp, Artificial Sequence
  Synthetic Polynucleotide
atggccttaccagtgaccgccttgctcctgccgctggccttgctgctccacgccgccaggccgctcgaggggaaaccaattcccaaccctcttctgggactggattcaaccggcagcggcgaggacctgaagaacgtgttcccacctgaggtggccgtgttcgagcctagcaaggccgagatcgcccacacccagaaagccaccctcgtgtgcctggctaccggcttctaccccgaccatgtggaactgtcttggtgggtcaacggcaaagaggtgcacagcggcgtgtgtaccgacccccagccactgaaagaacagcccgccctgaacgacagccggtactgcctgagcagcagactgagagtgtccgccaccttctggcagaacccccggaaccacttcagatgccaggtgcagttctacggcctgagcgagaacgacgagtggacccaggacagagccaagcccgtgacccagatcgtgtctgccgaagcctggggcagagccgattgcggcatcaccagcgccagctaccaccagggcgtgctgagcgccaccatcctgtacgagatcctgctgggcaaggccaccctgtacgccgtgctggtgtctgccctggtgctgatggctatggtcaagcggaaggacagccggggaagggccaagcgatctggatctggagcaacaaacttctcactactcaaacaagcaggtgacgtggaggagaatcccgggcctactagcaccatggccttaccagtgaccgccttgctcctgccgctggccttgctgctccacgccgccaggccggacgagatcgtgctgacacagagccccgccaccctgtcactgtctccaggcgaaagagccaccctgagctgtagcgccagcagcagcgtgtcctacatgcactggtatcagcagaagcccggccaggcccccagactgctgatctacgataccagcaagctggcctccggcatccccgccagattttctggcagcggctccggcaccgacttcaccctgacaatcagcagcctggaacccgaggacgtggccgtgtactactgttttcaaggcagcgtgtaccccttcaccttcggccagggcaccaagctggaaatcaagagaggtggcggtggctcgggcggtggtgggtcgggtggcggcggatctcaggtgcagctccaggaatctggccctggcctcgtgaagcctagccagaccctgagcctgacctgtaccgtgtctggcggcagcatcagcacaagcggcatgggcgtgggctggatcagacagcaccctggcaagggcctggaatggatcggccacatttggtgggacgacgacaagcggtacaaccccgccctgaagtccagagtgaccatcagcgtggacaccagcaagaaccagttcagcctgaagctgagcagcgtgacagccgccgataccgccgtgtattattgcgcccggatggaactgtggtcctactacttcgactactggggccagggaaccctcgtgaccgtgtctagtacgcgtgaagccgcagcaaaggagatcgtgctgacacagagccctgccaccctgtctctgagccctggcgaaagagccaccctgagctgtagagccagccagagcgtgtccagctacctggcctggtatcagcagaagcccggccaggctccccggctgctgatctacgatgccagcaatagagccaccggcatccccgccagattttccggctctggcagcggcaccgacttcaccctgaccatcagctccctggaacccgaggacttcgccgtgtactactgccagcagcggagcaactggcccatcacattcggccagggcacccggctggaaatcaaaggcggaggcggaagtggaggcggaggatctggcggcggaggctctgaagtgcagctggtggaatcaggcggcggactggtgcagcctggcagaagcctgagactgagctgtgccgccagcggcttcaccttcaacgactacgccatgcactgggtgcgccaggcccctggaaaaggactggaatgggtgtccacaatcagctggaacagcggcagcatcggctacgccgatagcgtgaagggccggttcaccatcagccgggacaacgccaagaagtccctgtacctccagatgaacagcctgcgggccgaggacacagccctgtactattgcgccaaggacatccagtacggcaactactactacggcatggacgtgtggggccagggaaccaccgtgaccgtgtcatctacgcgtgagcagaaactgatctcggaagaggatgggagcggcatccagaaccctgatcctgccgtgtaccagctgcgggatagcaagagcagcgacaagagcgtgtgtctgttcaccgacttcgacagccagaccaacgtgtcccagagcaaggactccgacgtgtacatcaccgataagtgcgtgctggacatgcggagcatggacttcaagagcaactccgccgtggcctggtccaacaagtccgatttcgcctgcgccaacgccttcaacaacagcattatccccgaggacacattcttcccaagcagcgacgtgccctgcgacgtgaagctggtggaaaagagcttcgagacagacaccaacctgaacttccagaacctgagcgtgatcggcttcagaatcctgctgctgaaagtggccggctttaacctgctgatgaccctgcggctgtggtccagccgcgccaagagaagcggatctggcgtgaagcagaccctgaatttcgacctgctgaagctggctggcgacgtggaatccaacccaggcccttctagaggccatatgaccgagtacaagcccacggtgcgcctcgccacccgcgacgacgtccccagggccgtacgcaccctcgccgccgcgttcgccgactaccccgccacgcgccacaccgtcgatccggaccgccacatcgagcgggtcaccgagctgcaagaactcttcctcacgcgcgtcgggctcgacatcggcaaggtgtgggtcgcggacgacggcgccgcggtggcggtctggaccacgccggagagcgtcgaagcgggggcggtgttcgccgagatcggcccgcgcatggccgagttgagcggttcccggctggccgcgcagcaacagatggaaggcctcctggcgccgcaccggcccaaggagcccgcgtggttcctggccaccgtcggcgtctcgcccgaccaccagggcaagggtctgggcagcgccgtcgtgctccccggagtggaggcggccgagcgcgccggggtgcccgccttcctggagacctccgcgccccgcaacctccccttctacgagcggctcggcttcaccgtcaccgccgacgtcgaggtgcccgaaggaccgcgcacctggtgcatgacccgcaagcccggtgcctga

SEQ ID NO: 21978 - DNA, 3453 bp, Artificial Sequence
  Synthetic Polynucleotide
atggccttaccagtgaccgccttgctcctgccgctggccttgctgctccacgccgccaggccgctcgaggggaaaccaattcccaaccctcttctgggactggattcaaccggcagcggcgaggacctgaagaacgtgttcccacctgaggtggccgtgttcgagcctagcaaggccgagatcgcccacacccagaaagccaccctcgtgtgcctggctaccggcttctaccccgaccatgtggaactgtcttggtgggtcaacggcaaagaggtgcacagcggcgtgtgtaccgacccccagccactgaaagaacagcccgccctgaacgacagccggtactgcctgagcagcagactgagagtgtccgccaccttctggcagaacccccggaaccacttcagatgccaggtgcagttctacggcctgagcgagaacgacgagtggacccaggacagagccaagcccgtgacccagatcgtgtctgccgaagcctggggcagagccgattgcggcatcaccagcgccagctaccaccagggcgtgctgagcgccaccatcctgtacgagatcctgctgggcaaggccaccctgtacgccgtgctggtgtctgccctggtgctgatggctatggtcaagcggaaggacagccggggaagggccaagcgatctggatctggagcaacaaacttctcactactcaaacaagcaggtgacgtggaggagaatcccgggcctactagcaccatggccttaccagtgaccgccttgctcctgccgctggccttgctgctccacgccgccaggccggagatcgtgatgacccagagccctgccaccctgtctctgagccctggcgaaagagccaccctgagctgtagagccagccaggacatcagcaagtacctgaactggtatcagcagaagcccggccaggcccccagactgctgatctaccacaccagcagactgcacagcggcatccccgccagattttctggctctggcagcggcaccgactacaccctgacaatcagcagcctccagcccgaggacttcgccgtgtacttctgtcagcaaggcaacaccctgccctacaccttcggccagggcaccaagctggaaatcaagggcggaggcggaagtggaggcggaggatctggcggcggaggctctcaggtgcaactccaggaatctggccctggcctcgtgaagcccagcgagacactgagcctgacctgtaccgtgtccggcgtgtccctgcctgactatggcgtgtcctggatcagacagccccctggcaagggcctggaatggatcggagtgatttggggcagcgaaaccacctactacaacagctccctgaagtccagagtgaccatctccaaggacaactccaagaaccaggtgtccctgaagctgagcagcgtgacagccgccgacaccgccgtgtattactgcgccaagcactactactacggcggcagctacgctatggactactggggccagggaaccctcgtgaccgtgtctagtacgcgtgaagccgcagcaaaggagatcgtgctgacacagagccctgccaccctgtctctgagccctggcgaaagagccaccctgagctgtagagccagccagagcgtgtccagctacctggcctggtatcagcagaagcccggccaggctccccggctgctgatctacgatgccagcaatagagccaccggcatccccgccagattttccggctctggcagcggcaccgacttcaccctgaccatcagctccctggaacccgaggacttcgccgtgtactactgccagcagcggagcaactggcccatcacattcggccagggcacccggctggaaatcaaaggcggaggcggaagtggaggcggaggatctggcggcggaggctctgaagtgcagctggtggaatcaggcggcggactggtgcagcctggcagaagcctgagactgagctgtgccgccagcggcttcaccttcaacgactacgccatgcactgggtgcgccaggcccctggaaaaggactggaatgggtgtccacaatcagctggaacagcggcagcatcggctacgccgatagcgtgaagggccggttcaccatcagccgggacaacgccaagaagtccctgtacctccagatgaacagcctgcgggccgaggacacagccctgtactattgcgccaaggacatccagtacggcaactactactacggcatggacgtgtggggccagggaaccaccgtgaccgtgtcatctacgcgtgagcagaaactgatctcggaagaggatgggagcggcatccagaaccctgatcctgccgtgtaccagctgcgggatagcaagagcagcgacaagagcgtgtgtctgttcaccgacttcgacagccagaccaacgtgtcccagagcaaggactccgacgtgtacatcaccgataagtgcgtgctggacatgcggagcatggacttcaagagcaactccgccgtggcctggtccaacaagtccgatttcgcctgcgccaacgccttcaacaacagcattatccccgaggacacattcttcccaagcagcgacgtgccctgcgacgtgaagctggtggaaaagagcttcgagacagacaccaacctgaacttccagaacctgagcgtgatcggcttcagaatcctgctgctgaaagtggccggctttaacctgctgatgaccctgcggctgtggtccagccgcgccaagagaagcggatctggcgtgaagcagaccctgaatttcgacctgctgaagctggctggcgacgtggaatccaacccaggcccttctagaggccatatgaccgagtacaagcccacggtgcgcctcgccacccgcgacgacgtccccagggccgtacgcaccctcgccgccgcgttcgccgactaccccgccacgcgccacaccgtcgatccggaccgccacatcgagcgggtcaccgagctgcaagaactcttcctcacgcgcgtcgggctcgacatcggcaaggtgtgggtcgcggacgacggcgccgcggtggcggtctggaccacgccggagagcgtcgaagcgggggcggtgttcgccgagatcggcccgcgcatggccgagttgagcggttcccggctggccgcgcagcaacagatggaaggcctcctggcgccgcaccggcccaaggagcccgcgtggttcctggccaccgtcggcgtctcgcccgaccaccagggcaagggtctgggcagcgccgtcgtgctccccggagtggaggcggccgagcgcgccggggtgcccgccttcctggagacctccgcgccccgcaacctccccttctacgagcggctcggcttcaccgtcaccgccgacgtcgaggtgcccgaaggaccgcgcacctggtgcatgacccgcaagcccggtgcctga

SEQ ID NO: 21979 - DNA, 3444 bp, Artificial Sequence
  Synthetic Polynucleotide
atggccttaccagtgaccgccttgctcctgccgctggccttgctgctccacgccgccaggccgctcgaggggaaaccaattcccaaccctcttctgggactggattcaaccggcagcggcgaggacctgaagaacgtgttcccacctgaggtggccgtgttcgagcctagcaaggccgagatcgcccacacccagaaagccaccctcgtgtgcctggctaccggcttctaccccgaccatgtggaactgtcttggtgggtcaacggcaaagaggtgcacagcggcgtgtgtaccgacccccagccactgaaagaacagcccgccctgaacgacagccggtactgcctgagcagcagactgagagtgtccgccaccttctggcagaacccccggaaccacttcagatgccaggtgcagttctacggcctgagcgagaacgacgagtggacccaggacagagccaagcccgtgacccagatcgtgtctgccgaagcctggggcagagccgattgcggcatcaccagcgccagctaccaccagggcgtgctgagcgccaccatcctgtacgagatcctgctgggcaaggccaccctgtacgccgtgctggtgtctgccctggtgctgatggctatggtcaagcggaaggacagccggggaagggccaagcgatctggatctggagcaacaaacttctcactactcaaacaagcaggtgacgtggaggagaatcccgggcctactagcaccatggccttaccagtgaccgccttgctcctgccgctggccttgctgctccacgccgccaggccggacatccagatgacccagagccccagcagcctgtctgccagcgtgggcgacagagtgaccatcacatgcaaggccagccaggacgtgggaatcgccgtggcctggtatcagcagaaacccggcaaggtgcccaagctgctgatctactgggccagcaccagacacaccggcgtgcccgatagattttccggcagcggctccggcaccgacttcaccctgacaatcagctccctccagcccgaggacgtggcaacctactactgccagcagtacagcagctacccctacaccttcggccagggcaccaaggtggaaatcaagggcggaggcggaagtggaggcggaggatctggcggcggaggctctgaagtgcaactggtggaatcaggcggcggactggtgcagcctggcggatctctgagactgagctgtgccgccagcggcttcgacttcagccggtactggatgagctgggtgcgccaggcccctggcaaaggactggaatggatcggcgagatcaaccccgacagcagcaccatcaactacgcccccagcctgaaggacaagttcatcatcagccgggacaacgccaagaacagcctgtacctccagatgaactccctgcgggccgaggacaccgccgtgtactattgcgccagacccgacggcaactactggtacttcgacgtgtggggccagggaaccctcgtgaccgtgtcatctacgcgtgaagccgcagcaaaggacatccagatgacacagactacatcctccctgtctgcctctctgggagacagagtcaccatcagttgcagggcaagtcaggacattagtaaatatttaaattggtatcagcagaaaccagatggaactgttaaactcctgatctaccatacatcaagattacactcaggagtcccatcaaggttcagtggcagtgggtctggaacagattattctctcaccattagcaacctggagcaagaagatattgccacttacttttgccaacagggtaatacgcttccgtacacgttcggaggggggaccaagctggagatcacaggtggcggtggctcgggcggtggtgggtcgggtggcggcggatctgaggtgaaactgcaggagtcaggacctggcctggtggcgccctcacagagcctgtccgtcacatgcactgtctcaggggtctcattacccgactatggtgtaagctggattcgccagcctccacgaaagggtctggagtggctgggagtaatatggggtagtgaaaccacatactataattcagctctcaaatccagactgaccatcatcaaggacaactccaagagccaagttttcttaaaaatgaacagtctgcaaactgatgacacagccatttactactgtgccaaacattattactacggtggtagctatgctatggactactggggtcaaggaacctcagtcaccgtctcctcaacgcgtgagcagaaactgatctcggaagaggatgggagcggcatccagaaccctgatcctgccgtgtaccagctgcgggatagcaagagcagcgacaagagcgtgtgtctgttcaccgacttcgacagccagaccaacgtgtcccagagcaaggactccgacgtgtacatcaccgataagtgcgtgctggacatgcggagcatggacttcaagagcaactccgccgtggcctggtccaacaagtccgatttcgcctgcgccaacgccttcaacaacagcattatccccgaggacacattcttcccaagcagcgacgtgccctgcgacgtgaagctggtggaaaagagcttcgagacagacaccaacctgaacttccagaacctgagcgtgatcggcttcagaatcctgctgctgaaagtggccggctttaacctgctgatgaccctgcggctgtggtccagccgcgccaagagaagcggatctggcgtgaagcagaccctgaatttcgacctgctgaagctggctggcgacgtggaatccaacccaggcccttctagaggccatatgaccgagtacaagcccacggtgcgcctcgccacccgcgacgacgtccccagggccgtacgcaccctcgccgccgcgttcgccgactaccccgccacgcgccacaccgtcgatccggaccgccacatcgagcgggtcaccgagctgcaagaactcttcctcacgcgcgtcgggctcgacatcggcaaggtgtgggtcgcggacgacggcgccgcggtggcggtctggaccacgccggagagcgtcgaagcgggggcggtgttcgccgagatcggcccgcgcatggccgagttgagcggttcccggctggccgcgcagcaacagatggaaggcctcctggcgccgcaccggcccaaggagcccgcgtggttcctggccaccgtcggcgtctcgcccgaccaccagggcaagggtctgggcagcgccgtcgtgctccccggagtggaggcggccgagcgcgccggggtgcccgccttcctggagacctccgcgccccgcaacctccccttctacgagcggctcggcttcaccgtcaccgccgacgtcgaggtgcccgaaggaccgcgcacctggtgcatgacccgcaagcccggtgcctga

SEQ ID NO: 21980 - DNA, 3426 bp, Artificial Sequence
  Synthetic Polynucleotide
atggccttaccagtgaccgccttgctcctgccgctggccttgctgctccacgccgccaggccggacgagatcgtgctgacacagagccccgccaccctgtcactgtctccaggcgaaagagccaccctgagctgtagcgccagcagcagcgtgtcctacatgcactggtatcagcagaagcccggccaggcccccagactgctgatctacgataccagcaagctggcctccggcatccccgccagattttctggcagcggctccggcaccgacttcaccctgacaatcagcagcctggaacccgaggacgtggccgtgtactactgttttcaaggcagcgtgtaccccttcaccttcggccagggcaccaagctggaaatcaagagaggtggcggtggctcgggcggtggtgggtcgggtggcggcggatctcaggtgcagctccaggaatctggccctggcctcgtgaagcctagccagaccctgagcctgacctgtaccgtgtctggcggcagcatcagcacaagcggcatgggcgtgggctggatcagacagcaccctggcaagggcctggaatggatcggccacatttggtgggacgacgacaagcggtacaaccccgccctgaagtccagagtgaccatcagcgtggacaccagcaagaaccagttcagcctgaagctgagcagcgtgacagccgccgataccgccgtgtattattgcgcccggatggaactgtggtcctactacttcgactactggggccagggaaccctcgtgaccgtgtctagtctcgaggggaaaccaattcccaaccctcttctgggactggattcaaccggcagcggcgaggacctgaagaacgtgttcccacctgaggtggccgtgttcgagcctagcaaggccgagatcgcccacacccagaaagccaccctcgtgtgcctggctaccggcttctaccccgaccatgtggaactgtcttggtgggtcaacggcaaagaggtgcacagcggcgtgtgtaccgacccccagccactgaaagaacagcccgccctgaacgacagccggtactgcctgagcagcagactgagagtgtccgccaccttctggcagaacccccggaaccacttcagatgccaggtgcagttctacggcctgagcgagaacgacgagtggacccaggacagagccaagcccgtgacccagatcgtgtctgccgaagcctggggcagagccgattgcggcatcaccagcgccagctaccaccagggcgtgctgagcgccaccatcctgtacgagatcctgctgggcaaggccaccctgtacgccgtgctggtgtctgccctggtgctgatggctatggtcaagcggaaggacagccggggaagggccaagcgatctggatctggagcaacaaacttctcactactcaaacaagcaggtgacgtggaggagaatcccgggcctactagcaccatggccttaccagtgaccgccttgctcctgccgctggccttgctgctccacgccgccaggccggacatccagatgacccagagccccagcagcctgtctgccagcgtgggcgacagagtgaccatcacatgcaaggccagccaggacgtgggaatcgccgtggcctggtatcagcagaaacccggcaaggtgcccaagctgctgatctactgggccagcaccagacacaccggcgtgcccgatagattttccggcagcggctccggcaccgacttcaccctgacaatcagctccctccagcccgaggacgtggcaacctactactgccagcagtacagcagctacccctacaccttcggccagggcaccaaggtggaaatcaagggcggaggcggaagtggaggcggaggatctggcggcggaggctctgaagtgcaactggtggaatcaggcggcggactggtgcagcctggcggatctctgagactgagctgtgccgccagcggcttcgacttcagccggtactggatgagctgggtgcgccaggcccctggcaaaggactggaatggatcggcgagatcaaccccgacagcagcaccatcaactacgcccccagcctgaaggacaagttcatcatcagccgggacaacgccaagaacagcctgtacctccagatgaactccctgcgggccgaggacaccgccgtgtactattgcgccagacccgacggcaactactggtacttcgacgtgtggggccagggaaccctcgtgaccgtgtcatctacgcgtgagcagaaactgatctcggaagaggatgggagcggcatccagaaccctgatcctgccgtgtaccagctgcgggatagcaagagcagcgacaagagcgtgtgtctgttcaccgacttcgacagccagaccaacgtgtcccagagcaaggactccgacgtgtacatcaccgataagtgcgtgctggacatgcggagcatggacttcaagagcaactccgccgtggcctggtccaacaagtccgatttcgcctgcgccaacgccttcaacaacagcattatccccgaggacacattcttcccaagcagcgacgtgccctgcgacgtgaagctggtggaaaagagcttcgagacagacaccaacctgaacttccagaacctgagcgtgatcggcttcagaatcctgctgctgaaagtggccggctttaacctgctgatgaccctgcggctgtggtccagccgcgccaagagaagcggatctggcgtgaagcagaccctgaatttcgacctgctgaagctggctggcgacgtggaatccaacccaggcccttctagaggccatatgaccgagtacaagcccacggtgcgcctcgccacccgcgacgacgtccccagggccgtacgcaccctcgccgccgcgttcgccgactaccccgccacgcgccacaccgtcgatccggaccgccacatcgagcgggtcaccgagctgcaagaactcttcctcacgcgcgtcgggctcgacatcggcaaggtgtgggtcgcggacgacggcgccgcggtggcggtctggaccacgccggagagcgtcgaagcgggggcggtgttcgccgagatcggcccgcgcatggccgagttgagcggttcccggctggccgcgcagcaacagatggaaggcctcctggcgccgcaccggcccaaggagcccgcgtggttcctggccaccgtcggcgtctcgcccgaccaccagggcaagggtctgggcagcgccgtcgtgctccccggagtggaggcggccgagcgcgccggggtgcccgccttcctggagacctccgcgccccgcaacctccccttctacgagcggctcggcttcaccgtcaccgccgacgtcgaggtgcccgaaggaccgcgcacctggtgcatgacccgcaagcccggtgcctga

SEQ ID NO: 21981 - DNA, 3303 bp, Artificial Sequence
  Synthetic Polynucleotide
atggccttaccagtgaccgccttgctcctgccgctggccttgctgctccacgccgccaggccggacatccagatgacacagactacatcctccctgtctgcctctctgggagacagagtcaccatcagttgcagggcaagtcaggacattagtaagtacctgaactggtatcagcagaaaccagatggaactgttaaactcctgatctaccatacatcaagattacactcaggagtcccatcaaggttcagtggcagtgggtctggaacagattattctctcaccattagcaacctggagcaagaagatattgccacttacttttgccaacagggtaatacgcttccgtacacgttcggaggggggaccaagctggagatcacagaggttgcggcgctcgaaagggacatcgtgatgacacagagccccgccacactgtcactgtctccaggcgaaagagccacactgagctgtcggagcagcaagagcctccagaacgtgaacggcaacacctacctgtactggttccagcagaagcccggccagtctcctcagctcctgatctacagaatgagcaacctgaacagcggcgtgcccgacagattttctggcagcggaagcggcaccgagttcaccctgaccataagcagcctggaacctgaggacttcgccgtgtactactgtatgcagcacctggaataccccatcaccttcggagccggcaccaagctggaaatcaaactcgaggacctgaagaacgtgttcccacctgaggtggccgtgttcgagcctagcaaggccgagatcgcccacacccagaaagccaccctcgtgtgcctggctaccggcttctaccccgaccatgtggaactgtcttggtgggtcaacggcaaagaggtgcacagcggcgtgtgtaccgacccccagccactgaaagaacagcccgccctgaacgacagccggtactgcctgagcagcagactgagagtgtccgccaccttctggcagaacccccggaaccacttcagatgccaggtgcagttctacggcctgagcgagaacgacgagtggacccaggacagagccaagcccgtgacccagatcgtgtctgccgaagcctggggcagagccgattgcggcatcaccagcgccagctaccaccagggcgtgctgagcgccaccatcctgtacgagatcctgctgggcaaggccaccctgtacgccgtgctggtgtctgccctggtgctgatggctatggtcaagcggaaggacagccggggaagggccaagcgatctggatctggagcaacaaacttctcactactcaaacaagcaggtgacgtggaggagaatcccgggcctactagtgccaccatggactggatttggcgcatccttttccttgtcggcgctgctaccggcgcgcattccttcgaagtgaaactgcaggagtcaggacctggcctggtggcgccctcacagagcctgtccgtcacatgcactgtctcaggggtctcattacccgactatggtgtaagctggattcgccagcctccacgaaagggtctggagtggctgggagtaatatggggtagtgaaaccacatactataattcagctctcaaatccagactgaccatcatcaaggacaactccaagagccaagttttcttaaaaatgaacagtctgcaaactgatgacacagccatttactactgtgccaaacattattactacggtggtagctatgctatggactactggggccaaggaacctcagtcaccgtctcctcacgtgtggctgcgctcaaggaggtgcaactggttgaatctggcggcggactggttaagcctggcggatctctgaagctgagctgtgccgccagcggctacacctttaccagctacgtgatgcactgggtccgacaggcccctggcaaaggacttgagtggatcggctacatcaacccctacaacgatggcaccaagtacaacgagaagttccagggcagagtgaccatcagctccgacaagagcatcagcaccgcctacatggaactgagcagcctgagaagcgaggataccgccatgtactattgcgccagaggcacctactactacggcaccagagtgttcgactactggggccagggaaccctggtcacagtctcttctacgcgtatccagaaccctgatcctgccgtgtaccagctgcgggatagcaagagcagcgacaagagcgtgtgtctgttcaccgacttcgacagccagaccaacgtgtcccagagcaaggactccgacgtgtacatcaccgataagtgcgtgctggacatgcggagcatggacttcaagagcaactccgccgtggcctggtccaacaagtccgatttcgcctgcgccaacgccttcaacaacagcattatccccgaggacacattcttcccaagcagcgacgtgccctgcgacgtgaagctggtggaaaagagcttcgagacagacaccaacctgaacttccagaacctgagcgtgatcggcttcagaatcctgctgctgaaagtggccggctttaacctgctgatgaccctgcggctgtggtccagccgcgccaagagaagcggatctggcgtgaagcagaccctgaatttcgacctgctgaagctggctggcgacgtggaatccaacccaggcccttctagaggccatatgaccgagtacaagcccacggtgcgcctcgccacccgcgacgacgtccccagggccgtacgcaccctcgccgccgcgttcgccgactaccccgccacgcgccacaccgtcgatccggaccgccacatcgagcgggtcaccgagctgcaagaactcttcctcacgcgcgtcgggctcgacatcggcaaggtgtgggtcgcggacgacggcgccgcggtggcggtctggaccacgccggagagcgtcgaagcgggggcggtgttcgccgagatcggcccgcgcatggccgagttgagcggttcccggctggccgcgcagcaacagatggaaggcctcctggcgccgcaccggcccaaggagcccgcgtggttcctggccaccgtcggcgtctcgcccgaccaccagggcaagggtctgggcagcgccgtcgtgctccccggagtggaggcggccgagcgcgccggggtgcccgccttcctggagacctccgcgccccgcaacctccccttctacgagcggctcggcttcaccgtcaccgccgacgtcgaggtgcccgaaggaccgcgcacctggtgcatgacccgcaagcccggtgcctga

SEQ ID NO: 21982 - DNA, 3297 bp, Artificial Sequence
  Synthetic Polynucleotide
atggccttaccagtgaccgccttgctcctgccgctggccttgctgctccacgccgccaggccggacatccagatgacacagactacatcctccctgtctgcctctctgggagacagagtcaccatcagttgcagggcaagtcaggacattagtaagtacctgaactggtatcagcagaaaccagatggaactgttaaactcctgatctaccatacatcaagattacactcaggagtcccatcaaggttcagtggcagtgggtctggaacagattattctctcaccattagcaacctggagcaagaagatattgccacttacttttgccaacagggtaatacgcttccgtacacgttcggaggggggaccaagctggagatcacagaggttgcggcgctcgaaaggtcttctgagctgacacaggaccctgccgtgtctgttgctctgggccagacagtgcggattacctgtcagggcgatagcctgagaagctactacgcctcctggtatcagcagaagccaggccaggctcctgtgctggtcatctacggcaagaacaacagacccagcggcatccccgatagattcagcggaagcagctctggcaataccgccagcctgacaattactggcgctcaggccgaggacgaggccgactactactgcaacagcagagatagcagcggctgggttttcggcggaggcacaaaactgacagtgctgctcgagatccagaaccctgatcctgccgtgtaccagctgcgggatagcaagagcagcgacaagagcgtgtgtctgttcaccgacttcgacagccagaccaacgtgtcccagagcaaggactccgacgtgtacatcaccgataagtgcgtgctggacatgcggagcatggacttcaagagcaactccgccgtggcctggtccaacaagtccgatttcgcctgcgccaacgccttcaacaacagcattatccccgaggacacattcttcccaagcagcgacgtgccctgcgacgtgaagctggtggaaaagagcttcgagacagacaccaacctgaacttccagaacctgagcgtgatcggcttcagaatcctgctgctgaaagtggccggctttaacctgctgatgaccctgcggctgtggtccagccgcgccaagagaagcggatctggcgtgaagcagaccctgaatttcgacctgctgaagctggctggcgacgtggaatccaacccaggccctactagtgccaccatggactggatttggcgcatccttttccttgtcggcgctgctaccggcgcgcattccttcgaagtgaaactgcaggagtcaggacctggcctggtggcgccctcacagagcctgtccgtcacatgcactgtctcaggggtctcattacccgactatggtgtaagctggattcgccagcctccacgaaagggtctggagtggctgggagtaatatggggtagtgaaaccacatactataattcagctctcaaatccagactgaccatcatcaaggacaactccaagagccaagttttcttaaaaatgaacagtctgcaaactgatgacacagccatttactactgtgccaaacattattactacggtggtagctatgctatggactactggggccaaggaacctcagtcaccgtctcctcacgtgtggctgcgctcaaggaggtgcaactggttgagtctggcggaggactggtgcagcctggaagaagcctgagactgtcttgtgccgccagcggcttcaccttcgacgattatgccatgcactgggtccgacaggcccctggcaaaggacttgaatgggtgtccggcatctcctggaacagcggctctatcggctacgccgattccgtgaagggcagattcaccatcagccgggacaacgccaagaacagcctgtacctccagatgaactccctgagagccgaggacacagccctgtactactgcgccaaagacaaaggcggaggctactacgacttttggagcggcagcgattattggggccagggcacactggtcacagtgtctagcacgcgtgaggacctgaagaacgtgttcccacctgaggtggccgtgttcgagcctagcaaggccgagatcgcccacacccagaaagccaccctcgtgtgcctggctaccggcttctaccccgaccatgtggaactgtcttggtgggtcaacggcaaagaggtgcacagcggcgtgtgtaccgacccccagccactgaaagaacagcccgccctgaacgacagccggtactgcctgagcagcagactgagagtgtccgccaccttctggcagaacccccggaaccacttcagatgccaggtgcagttctacggcctgagcgagaacgacgagtggacccaggacagagccaagcccgtgacccagatcgtgtctgccgaagcctggggcagagccgattgcggcatcaccagcgccagctaccaccagggcgtgctgagcgccaccatcctgtacgagatcctgctgggcaaggccaccctgtacgccgtgctggtgtctgccctggtgctgatggctatggtcaagcggaaggacagccggggaagggccaagcgatctggatctggagcaacaaacttctcactactcaaacaagcaggtgacgtggaggagaatcccgggccttctagaggccatatgaccgagtacaagcccacggtgcgcctcgccacccgcgacgacgtccccagggccgtacgcaccctcgccgccgcgttcgccgactaccccgccacgcgccacaccgtcgatccggaccgccacatcgagcgggtcaccgagctgcaagaactcttcctcacgcgcgtcgggctcgacatcggcaaggtgtgggtcgcggacgacggcgccgcggtggcggtctggaccacgccggagagcgtcgaagcgggggcggtgttcgccgagatcggcccgcgcatggccgagttgagcggttcccggctggccgcgcagcaacagatggaaggcctcctggcgccgcaccggcccaaggagcccgcgtggttcctggccaccgtcggcgtctcgcccgaccaccagggcaagggtctgggcagcgccgtcgtgctccccggagtggaggcggccgagcgcgccggggtgcccgccttcctggagacctccgcgccccgcaacctccccttctacgagcggctcggcttcaccgtcaccgccgacgtcgaggtgcccgaaggaccgcgcacctggtgcatgacccgcaagcccggtgcctga

SEQ ID NO: 21983 - DNA, 3306 bp, Artificial Sequence
  Synthetic Polynucleotide
atggccttaccagtgaccgccttgctcctgccgctggccttgctgctccacgccgccaggccggacatccagatgacccagaccacaagcagcctgtctgccagcctgggcgacagagtgaccatctcttgtagagccagccaggacatcagcaactacctgaactggtatcagcagaaacccgacggcaccgtgaagctgctgatctactacaccagcatcctgcacagcggcgtgcccagcagattttctggctctggcagcggcaccgactacagcctgaccatcagcaatctggaacaagaggacttcgctacctacttctgccagcaaggcaacaccctgccttggacatttggcggaggcaccaagctggaaatcaaagctgaggttgcggcgctcgaaagggacgagatcgtgctgacacagagccctgccaccctgtctctgagccctggcgaaagagccaccctgagctgtagagccagccagagcgtgtccagctacctggcctggtatcagcagaagcccggccaggctccccggctgctgatctacgatgccagcaatagagccaccggcatccccgccagattttccggctctggcagcggcaccgacttcaccctgaccatcagctccctggaacccgaggacttcgccgtgtactactgccagcagcggagcaactggcccatcacattcggccagggcacccggctggaaatcaaactcgagatccagaaccctgatcctgccgtgtaccagctgcgggatagcaagagcagcgacaagagcgtgtgtctgttcaccgacttcgacagccagaccaacgtgtcccagagcaaggactccgacgtgtacatcaccgataagtgcgtgctggacatgcggagcatggacttcaagagcaactccgccgtggcctggtccaacaagtccgatttcgcctgcgccaacgccttcaacaacagcattatccccgaggacacattcttcccaagcagcgacgtgccctgcgacgtgaagctggtggaaaagagcttcgagacagacaccaacctgaacttccagaacctgagcgtgatcggcttcagaatcctgctgctgaaagtggccggctttaacctgctgatgaccctgcggctgtggtccagccgcgccaagagaagcggatctggcgtgaagcagaccctgaatttcgacctgctgaagctggctggcgacgtggaatccaacccaggccctactagtgccaccatggactggatttggcgcatccttttccttgtcggcgctgctaccggcgcgcattccttcgaagtgcaactggttgaatctggcggcggactggttaagcctggcggatctctgaagctgagctgtgccgcctctggcttcgccttcagcatctacgatatgagctgggtccgacagacccctgagaagagactggaatgggtcgcctacatctctagcggcggagggacctactatcccgacacagtgaagggcagattcaccatctccagagacaacgccaagaacaccctgtacctccagatgagcagcctgaagtccgaggacaccgccatgtactactgcgccagacacagcggctatggcacacattggggagtgctgtttgcctactggggccagggaacactggtcacagtttctgctcgtgtggctgcgctcaaggaggtgcagctggtggaatcaggcggcggactggtgcagcctggcagaagcctgagactgagctgtgccgccagcggcttcaccttcaacgactacgccatgcactgggtgcgccaggcccctggaaaaggactggaatgggtgtccacaatcagctggaacagcggcagcatcggctacgccgatagcgtgaagggccggttcaccatcagccgggacaacgccaagaagtccctgtacctccagatgaacagcctgcgggccgaggacacagccctgtactattgcgccaaggacatccagtacggcaactactactacggcatggacgtgtggggccagggaaccaccgtgaccgtgtcatctacgcgtgaggacctgaagaacgtgttcccacctgaggtggccgtgttcgagcctagcaaggccgagatcgcccacacccagaaagccaccctcgtgtgcctggctaccggcttctaccccgaccatgtggaactgtcttggtgggtcaacggcaaagaggtgcacagcggcgtgtgtaccgacccccagccactgaaagaacagcccgccctgaacgacagccggtactgcctgagcagcagactgagagtgtccgccaccttctggcagaacccccggaaccacttcagatgccaggtgcagttctacggcctgagcgagaacgacgagtggacccaggacagagccaagcccgtgacccagatcgtgtctgccgaagcctggggcagagccgattgcggcatcaccagcgccagctaccaccagggcgtgctgagcgccaccatcctgtacgagatcctgctgggcaaggccaccctgtacgccgtgctggtgtctgccctggtgctgatggctatggtcaagcggaaggacagccggggaagggccaagcgatctggatctggagcaacaaacttctcactactcaaacaagcaggtgacgtggaggagaatcccgggccttctagaggccatatgaccgagtacaagcccacggtgcgcctcgccacccgcgacgacgtccccagggccgtacgcaccctcgccgccgcgttcgccgactaccccgccacgcgccacaccgtcgatccggaccgccacatcgagcgggtcaccgagctgcaagaactcttcctcacgcgcgtcgggctcgacatcggcaaggtgtgggtcgcggacgacggcgccgcggtggcggtctggaccacgccggagagcgtcgaagcgggggcggtgttcgccgagatcggcccgcgcatggccgagttgagcggttcccggctggccgcgcagcaacagatggaaggcctcctggcgccgcaccggcccaaggagcccgcgtggttcctggccaccgtcggcgtctcgcccgaccaccagggcaagggtctgggcagcgccgtcgtgctccccggagtggaggcggccgagcgcgccggggtgcccgccttcctggagacctccgcgccccgcaacctccccttctacgagcggctcggcttcaccgtcaccgccgacgtcgaggtgcccgaaggaccgcgcacctggtgcatgacccgcaagcccggtgcctga

SEQ ID NO: 21984 - DNA, 27 bp, Artificial Sequence
  Synthetic Polynucleotide
ggggggggggggggggggggggggggg

SEQ ID NO: 21985 - DNA, 2589 bp, Artificial Sequence
  Synthetic Polynucleotide
atggccttaccagtgaccgccttgctcctgccgctggccttgctgctccacgccgccaggccgcagctccagctgcaagagtctggacctggcctggtcaagcctagcgagacactgagcctgacctgtaccgtgtccggcgatagcatcagcagcggcgattactactggggctggatcagacagcctcctggcaaaggactggaatggatcggccacatctactacagcggcgtgacctactacaaccccagcctgaagtccagagtgaccatcagcgtggacaccagccggaaccagttctccctgaagctgtctagcgtgacagccgccgataccgccgtgtactactgcaccagagaggacagcagcaactggcggagtagaggccagggaacactggtcacagttagctctctcgaggacctgaagaacgtgttcccacctgaggtggccgtgttcgagcctagcgaggccgagatcagccacacccagaaagccaccctcgtgtgcctggctaccggcttctaccccgaccatgtggaactgtcttggtgggtcaacggcaaagaggtgcacagcggcgtgtgtaccgacccccagccactgaaagaacagcccgccctgaacgacagccggtactgcctgagcagcagactgagagtgtccgccaccttctggcagaacccccggaaccacttcagatgccaggtgcagttctacggcctgagcgagaacgacgagtggacccaggacagagccaagcccgtgacccagatcgtgtctgccgaagcctggggcagagccgattgcggctttaccagcgagagctaccagcagggcgtgctgagcgccaccatcctgtacgagatcctgctgggcaaggccaccctgtacgccgtgctggtgtctgccctggtgctgatggctatggtcaagcggaaggacagccggggaagggccaagcgatctggatctggagcaacaaacttctcactactcaaacaagcaggtgacgtggaggagaatcccgggcctactagtatggactggatttggcgcatccttttccttgtcggcgctgctaccggcgcccattccttcgaagtgcagctgcttgaaagtggcggcggactgattcagcctggcggatctctgagactgagctgtgccgccagcggcttcaccttttctagccacgccatgacctgggtccgacaggcacctggaaaagggcttgaatgggtgtccgccatcagcggctctggcgattacacacactacgccgacagcgtgaagggcagattcaccatcagcagagacaacagcaagaacaccgtgtacctccagatgaacagcctgagagccgaggacagcgccgtgtattattgcgccaaggatgaggatggcggcagcctgcttggacacagaggacaaggcaccctggtcaccgtttcttccacgcgtatccagaaccctgatcctgccgtgtaccagctgcgggatagcaagagcagcgacaagagcgtgtgtctgttcaccgacttcgacagccagaccaacgtgtcccagagcaaggactccgacgtgtacatcaccgataagtgcgtgctggacatgcggagcatggacttcaagagcaactccgccgtggcctggtccaacaagtccgatttcgcctgcgccaacgccttcaacaacagcattatccccgaggacacattcttcccaagccccgagagcagctgcgacgtgaagctggtggaaaagagcttcgagacagacaccaacctgaacttccagaacctgagcgtgatcggcttcagaatcctgctgctgaaagtggccggctttaacctgctgatgaccctgcggctgtggtccagccgcgccaagagaagcggatctggcgtgaagcagaccctgaatttcgacctgctgaagctggctggcgacgtggaatccaacccaggcccttctagaggccatatgaccgagtacaagcccacggtgcgcctcgccacccgcgacgacgtccccagggccgtacgcaccctcgccgccgcgttcgccgactaccccgccacgcgccacaccgtcgatccggaccgccacatcgagcgggtcaccgagctgcaagaactcttcctcacgcgcgtcgggctcgacatcggcaaggtgtgggtcgcggacgacggcgccgcggtggcggtctggaccacgccggagagcgtcgaagcgggggcggtgttcgccgagatcggcccgcgcatggccgagttgagcggttcccggctggccgcgcagcaacagatggaaggcctcctggcgccgcaccggcccaaggagcccgcgtggttcctggccaccgtcggcgtctcgcccgaccaccagggcaagggtctgggcagcgccgtcgtgctccccggagtggaggcggccgagcgcgccggggtgcccgccttcctggagacctccgcgccccgcaacctccccttctacgagcggctcggcttcaccgtcaccgccgacgtcgaggtgcccgaaggaccgcgcacctggtgcatgacccgcaagcccggtgcctga

SEQ ID NO: 21986 - DNA, 2598 bp, Artificial Sequence
  Synthetic Polynucleotide
atggccttaccagtgaccgccttgctcctgccgctggccttgctgctccacgccgccaggccgcagctccagctgcaagagtctggacctggcctggtcaagcctagcgagacactgagcctgacctgtaccgtgtccggcgatagcatcagcagcggcgattactactggggctggatcagacagcctcctggcaaaggactggaatggatcggccacatctactacagcggcgtgacctactacaaccccagcctgaagtccagagtgaccatcagcgtggacaccagccggaaccagttctccctgaagctgtctagcgtgacagccgccgataccgccgtgtactactgcaccagagaggacagcagcaactggcggagtagaggccagggaacactggtcacagttagctctctcgaggacctgaagaacgtgttcccacctgaggtggccgtgttcgagcctagcgaggccgagatcagccacacccagaaagccaccctcgtgtgcctggctaccggcttctaccccgaccatgtggaactgtcttggtgggtcaacggcaaagaggtgcacagcggcgtgtgtaccgacccccagccactgaaagaacagcccgccctgaacgacagccggtactgcctgagcagcagactgagagtgtccgccaccttctggcagaacccccggaaccacttcagatgccaggtgcagttctacggcctgagcgagaacgacgagtggacccaggacagagccaagcccgtgacccagatcgtgtctgccgaagcctggggcagagccgattgcggctttaccagcgagagctaccagcagggcgtgctgagcgccaccatcctgtacgagatcctgctgggcaaggccaccctgtacgccgtgctggtgtctgccctggtgctgatggctatggtcaagcggaaggacagccggggaagggccaagcgatctggatctggagcaacaaacttctcactactcaaacaagcaggtgacgtggaggagaatcccgggcctactagtatggactggatttggcgcatccttttccttgtcggcgctgctaccggcgcccattccttcgaagaggttcagctgcttgagtctggcggaggactggttcaacctggcggaagcctgagactgtcttgtgccgccagcggcttcacctttagcagctacgccatgagctgggtccgacaggctcctggcaaaggactggaatgggtgtccagcatcagcggcagcggcgactacatctactacgccgatagcgtgaagggcagattcaccatcagccgggacatcagcaagaacaccctgtacctccagatgaacagcctgagagccgaggacaccgccgtgtactactgtgccaaagaaggcaccggcgctaacagcagcctggccgattatagaggccagggcacactggtcaccgtgtctagtacgcgtatccagaaccctgatcctgccgtgtaccagctgcgggatagcaagagcagcgacaagagcgtgtgtctgttcaccgacttcgacagccagaccaacgtgtcccagagcaaggactccgacgtgtacatcaccgataagtgcgtgctggacatgcggagcatggacttcaagagcaactccgccgtggcctggtccaacaagtccgatttcgcctgcgccaacgccttcaacaacagcattatccccgaggacacattcttcccaagccccgagagcagctgcgacgtgaagctggtggaaaagagcttcgagacagacaccaacctgaacttccagaacctgagcgtgatcggcttcagaatcctgctgctgaaagtggccggctttaacctgctgatgaccctgcggctgtggtccagccgcgccaagagaagcggatctggcgtgaagcagaccctgaatttcgacctgctgaagctggctggcgacgtggaatccaacccaggcccttctagaggccatatgaccgagtacaagcccacggtgcgcctcgccacccgcgacgacgtccccagggccgtacgcaccctcgccgccgcgttcgccgactaccccgccacgcgccacaccgtcgatccggaccgccacatcgagcgggtcaccgagctgcaagaactcttcctcacgcgcgtcgggctcgacatcggcaaggtgtgggtcgcggacgacggcgccgcggtggcggtctggaccacgccggagagcgtcgaagcgggggcggtgttcgccgagatcggcccgcgcatggccgagttgagcggttcccggctggccgcgcagcaacagatggaaggcctcctggcgccgcaccggcccaaggagcccgcgtggttcctggccaccgtcggcgtctcgcccgaccaccagggcaagggtctgggcagcgccgtcgtgctccccggagtggaggcggccgagcgcgccggggtgcccgccttcctggagacctccgcgccccgcaacctccccttctacgagcggctcggcttcaccgtcaccgccgacgtcgaggtgcccgaaggaccgcgcacctggtgcatgacccgcaagcccggtgcctga

SEQ ID NO: 21987 - DNA, 2589 bp, Artificial Sequence
  Synthetic Polynucleotide
atggccttaccagtgaccgccttgctcctgccgctggccttgctgctccacgccgccaggccgcagctccagctgcaagagtctggacctggcctggtcaagcctagcgagacactgagcctgacctgtaccgtgtccggcgatagcatcagcagcggcgattactactggggctggatcagacagcctcctggcaaaggactggaatggatcggccacatctactacagcggcgtgacctactacaaccccagcctgaagtccagagtgaccatcagcgtggacaccagccggaaccagttctccctgaagctgtctagcgtgacagccgccgataccgccgtgtactactgcaccagagaggacagcagcaactggcggagtagaggccagggaacactggtcacagttagctctctcgaggacctgaagaacgtgttcccacctgaggtggccgtgttcgagcctagcgaggccgagatcagccacacccagaaagccaccctcgtgtgcctggctaccggcttctaccccgaccatgtggaactgtcttggtgggtcaacggcaaagaggtgcacagcggcgtgtgtaccgacccccagccactgaaagaacagcccgccctgaacgacagccggtactgcctgagcagcagactgagagtgtccgccaccttctggcagaacccccggaaccacttcagatgccaggtgcagttctacggcctgagcgagaacgacgagtggacccaggacagagccaagcccgtgacccagatcgtgtctgccgaagcctggggcagagccgattgcggctttaccagcgagagctaccagcagggcgtgctgagcgccaccatcctgtacgagatcctgctgggcaaggccaccctgtacgccgtgctggtgtctgccctggtgctgatggctatggtcaagcggaaggacagccggggaagggccaagcgatctggatctggagcaacaaacttctcactactcaaacaagcaggtgacgtggaggagaatcccgggcctactagtatggactggatttggcgcatccttttccttgtcggcgctgctaccggcgcccattccttcgaacaggtgcagctggttgaatctggcggaggactggttcagcctggcggatctctgagactgtcttgtgccgccagcggcttcaccttcaccaatcacgccatgagctgggtccgacaggcccctggaaaaggactggaactggtgtctagcatcagcggcaacggcagaaccacctactacgccgatagcgtgaagggcagattcaccatcagccgggacatcagcaagaacaccctggacctccagatgaacagcctgagagccgaggataccgccgtgtactactgtgccaaggatggcggagagacactggtggatagcagaggccagggcacactggtcacagtgtcatctacgcgtatccagaaccctgatcctgccgtgtaccagctgcgggatagcaagagcagcgacaagagcgtgtgtctgttcaccgacttcgacagccagaccaacgtgtcccagagcaaggactccgacgtgtacatcaccgataagtgcgtgctggacatgcggagcatggacttcaagagcaactccgccgtggcctggtccaacaagtccgatttcgcctgcgccaacgccttcaacaacagcattatccccgaggacacattcttcccaagccccgagagcagctgcgacgtgaagctggtggaaaagagcttcgagacagacaccaacctgaacttccagaacctgagcgtgatcggcttcagaatcctgctgctgaaagtggccggctttaacctgctgatgaccctgcggctgtggtccagccgcgccaagagaagcggatctggcgtgaagcagaccctgaatttcgacctgctgaagctggctggcgacgtggaatccaacccaggcccttctagaggccatatgaccgagtacaagcccacggtgcgcctcgccacccgcgacgacgtccccagggccgtacgcaccctcgccgccgcgttcgccgactaccccgccacgcgccacaccgtcgatccggaccgccacatcgagcgggtcaccgagctgcaagaactcttcctcacgcgcgtcgggctcgacatcggcaaggtgtgggtcgcggacgacggcgccgcggtggcggtctggaccacgccggagagcgtcgaagcgggggcggtgttcgccgagatcggcccgcgcatggccgagttgagcggttcccggctggccgcgcagcaacagatggaaggcctcctggcgccgcaccggcccaaggagcccgcgtggttcctggccaccgtcggcgtctcgcccgaccaccagggcaagggtctgggcagcgccgtcgtgctccccggagtggaggcggccgagcgcgccggggtgcccgccttcctggagacctccgcgccccgcaacctccccttctacgagcggctcggcttcaccgtcaccgccgacgtcgaggtgcccgaaggaccgcgcacctggtgcatgacccgcaagcccggtgcctga

SEQ ID NO: 21988 - DNA, 2598 bp, Artificial Sequence
  Synthetic Polynucleotide
atggccttaccagtgaccgccttgctcctgccgctggccttgctgctccacgccgccaggccggaggttcagctgcttgagtctggcggaggactggttcaacctggcggaagcctgagactgtcttgtgccgccagcggcttcacctttagcagctacgccatgagctgggtccgacaggctcctggcaaaggactggaatgggtgtccagcatcagcggcagcggcgactacatctactacgccgatagcgtgaagggcagattcaccatcagccgggacatcagcaagaacaccctgtacctccagatgaacagcctgagagccgaggacaccgccgtgtactactgtgccaaagaaggcaccggcgctaacagcagcctggccgattatagaggccagggcacactggtcaccgtgtctagtctcgaggacctgaagaacgtgttcccacctgaggtggccgtgttcgagcctagcgaggccgagatcagccacacccagaaagccaccctcgtgtgcctggctaccggcttctaccccgaccatgtggaactgtcttggtgggtcaacggcaaagaggtgcacagcggcgtgtgtaccgacccccagccactgaaagaacagcccgccctgaacgacagccggtactgcctgagcagcagactgagagtgtccgccaccttctggcagaacccccggaaccacttcagatgccaggtgcagttctacggcctgagcgagaacgacgagtggacccaggacagagccaagcccgtgacccagatcgtgtctgccgaagcctggggcagagccgattgcggctttaccagcgagagctaccagcagggcgtgctgagcgccaccatcctgtacgagatcctgctgggcaaggccaccctgtacgccgtgctggtgtctgccctggtgctgatggctatggtcaagcggaaggacagccggggaagggccaagcgatctggatctggagcaacaaacttctcactactcaaacaagcaggtgacgtggaggagaatcccgggcctactagtatggactggatttggcgcatccttttccttgtcggcgctgctaccggcgcccattccttcgaagtgcagctgcttgaaagtggcggcggactgattcagcctggcggatctctgagactgagctgtgccgccagcggcttcaccttttctagccacgccatgacctgggtccgacaggcacctggaaaagggcttgaatgggtgtccgccatcagcggctctggcgattacacacactacgccgacagcgtgaagggcagattcaccatcagcagagacaacagcaagaacaccgtgtacctccagatgaacagcctgagagccgaggacagcgccgtgtattattgcgccaaggatgaggatggcggcagcctgcttggacacagaggacaaggcaccctggtcaccgtttcttccacgcgtatccagaaccctgatcctgccgtgtaccagctgcgggatagcaagagcagcgacaagagcgtgtgtctgttcaccgacttcgacagccagaccaacgtgtcccagagcaaggactccgacgtgtacatcaccgataagtgcgtgctggacatgcggagcatggacttcaagagcaactccgccgtggcctggtccaacaagtccgatttcgcctgcgccaacgccttcaacaacagcattatccccgaggacacattcttcccaagccccgagagcagctgcgacgtgaagctggtggaaaagagcttcgagacagacaccaacctgaacttccagaacctgagcgtgatcggcttcagaatcctgctgctgaaagtggccggctttaacctgctgatgaccctgcggctgtggtccagccgcgccaagagaagcggatctggcgtgaagcagaccctgaatttcgacctgctgaagctggctggcgacgtggaatccaacccaggcccttctagaggccatatgaccgagtacaagcccacggtgcgcctcgccacccgcgacgacgtccccagggccgtacgcaccctcgccgccgcgttcgccgactaccccgccacgcgccacaccgtcgatccggaccgccacatcgagcgggtcaccgagctgcaagaactcttcctcacgcgcgtcgggctcgacatcggcaaggtgtgggtcgcggacgacggcgccgcggtggcggtctggaccacgccggagagcgtcgaagcgggggcggtgttcgccgagatcggcccgcgcatggccgagttgagcggttcccggctggccgcgcagcaacagatggaaggcctcctggcgccgcaccggcccaaggagcccgcgtggttcctggccaccgtcggcgtctcgcccgaccaccagggcaagggtctgggcagcgccgtcgtgctccccggagtggaggcggccgagcgcgccggggtgcccgccttcctggagacctccgcgccccgcaacctccccttctacgagcggctcggcttcaccgtcaccgccgacgtcgaggtgcccgaaggaccgcgcacctggtgcatgacccgcaagcccggtgcctga

SEQ ID NO: 21989 - DNA, 2598 bp, Artificial Sequence
  Synthetic Polynucleotide
atggccttaccagtgaccgccttgctcctgccgctggccttgctgctccacgccgccaggccgcaggtgcagctggttgaatctggcggaggactggttcagcctggcggatctctgagactgtcttgtgccgccagcggcttcaccttcaccaatcacgccatgagctgggtccgacaggcccctggaaaaggactggaactggtgtctagcatcagcggcaacggcagaaccacctactacgccgatagcgtgaagggcagattcaccatcagccgggacatcagcaagaacaccctggacctccagatgaacagcctgagagccgaggataccgccgtgtactactgtgccaaggatggcggagagacactggtggatagcagaggccagggcacactggtcacagtgtcatctctcgaggacctgaagaacgtgttcccacctgaggtggccgtgttcgagcctagcgaggccgagatcagccacacccagaaagccaccctcgtgtgcctggctaccggcttctaccccgaccatgtggaactgtcttggtgggtcaacggcaaagaggtgcacagcggcgtgtgtaccgacccccagccactgaaagaacagcccgccctgaacgacagccggtactgcctgagcagcagactgagagtgtccgccaccttctggcagaacccccggaaccacttcagatgccaggtgcagttctacggcctgagcgagaacgacgagtggacccaggacagagccaagcccgtgacccagatcgtgtctgccgaagcctggggcagagccgattgcggctttaccagcgagagctaccagcagggcgtgctgagcgccaccatcctgtacgagatcctgctgggcaaggccaccctgtacgccgtgctggtgtctgccctggtgctgatggctatggtcaagcggaaggacagccggggaagggccaagcgatctggatctggagcaacaaacttctcactactcaaacaagcaggtgacgtggaggagaatcccgggcctactagtatggactggatttggcgcatccttttccttgtcggcgctgctaccggcgcccattccttcgaagaggttcagctgcttgagtctggcggaggactggttcaacctggcggaagcctgagactgtcttgtgccgccagcggcttcacctttagcagctacgccatgagctgggtccgacaggctcctggcaaaggactggaatgggtgtccagcatcagcggcagcggcgactacatctactacgccgatagcgtgaagggcagattcaccatcagccgggacatcagcaagaacaccctgtacctccagatgaacagcctgagagccgaggacaccgccgtgtactactgtgccaaagaaggcaccggcgctaacagcagcctggccgattatagaggccagggcacactggtcaccgtgtctagtacgcgtatccagaaccctgatcctgccgtgtaccagctgcgggatagcaagagcagcgacaagagcgtgtgtctgttcaccgacttcgacagccagaccaacgtgtcccagagcaaggactccgacgtgtacatcaccgataagtgcgtgctggacatgcggagcatggacttcaagagcaactccgccgtggcctggtccaacaagtccgatttcgcctgcgccaacgccttcaacaacagcattatccccgaggacacattcttcccaagccccgagagcagctgcgacgtgaagctggtggaaaagagcttcgagacagacaccaacctgaacttccagaacctgagcgtgatcggcttcagaatcctgctgctgaaagtggccggctttaacctgctgatgaccctgcggctgtggtccagccgcgccaagagaagcggatctggcgtgaagcagaccctgaatttcgacctgctgaagctggctggcgacgtggaatccaacccaggcccttctagaggccatatgaccgagtacaagcccacggtgcgcctcgccacccgcgacgacgtccccagggccgtacgcaccctcgccgccgcgttcgccgactaccccgccacgcgccacaccgtcgatccggaccgccacatcgagcgggtcaccgagctgcaagaactcttcctcacgcgcgtcgggctcgacatcggcaaggtgtgggtcgcggacgacggcgccgcggtggcggtctggaccacgccggagagcgtcgaagcgggggcggtgttcgccgagatcggcccgcgcatggccgagttgagcggttcccggctggccgcgcagcaacagatggaaggcctcctggcgccgcaccggcccaaggagcccgcgtggttcctggccaccgtcggcgtctcgcccgaccaccagggcaagggtctgggcagcgccgtcgtgctccccggagtggaggcggccgagcgcgccggggtgcccgccttcctggagacctccgcgccccgcaacctccccttctacgagcggctcggcttcaccgtcaccgccgacgtcgaggtgcccgaaggaccgcgcacctggtgcatgacccgcaagcccggtgcctga

SEQ ID NO: 21990 - DNA, 2589 bp, Artificial Sequence
  Synthetic Polynucleotide
atggccttaccagtgaccgccttgctcctgccgctggccttgctgctccacgccgccaggccgcaggtgcagctggttgaatctggcggaggactggttcagcctggcggatctctgagactgtcttgtgccgccagcggcttcaccttcaccaatcacgccatgagctgggtccgacaggcccctggaaaaggactggaactggtgtctagcatcagcggcaacggcagaaccacctactacgccgatagcgtgaagggcagattcaccatcagccgggacatcagcaagaacaccctggacctccagatgaacagcctgagagccgaggataccgccgtgtactactgtgccaaggatggcggagagacactggtggatagcagaggccagggcacactggtcacagtgtcatctctcgaggacctgaagaacgtgttcccacctgaggtggccgtgttcgagcctagcgaggccgagatcagccacacccagaaagccaccctcgtgtgcctggctaccggcttctaccccgaccatgtggaactgtcttggtgggtcaacggcaaagaggtgcacagcggcgtgtgtaccgacccccagccactgaaagaacagcccgccctgaacgacagccggtactgcctgagcagcagactgagagtgtccgccaccttctggcagaacccccggaaccacttcagatgccaggtgcagttctacggcctgagcgagaacgacgagtggacccaggacagagccaagcccgtgacccagatcgtgtctgccgaagcctggggcagagccgattgcggctttaccagcgagagctaccagcagggcgtgctgagcgccaccatcctgtacgagatcctgctgggcaaggccaccctgtacgccgtgctggtgtctgccctggtgctgatggctatggtcaagcggaaggacagccggggaagggccaagcgatctggatctggagcaacaaacttctcactactcaaacaagcaggtgacgtggaggagaatcccgggcctactagtatggactggatttggcgcatccttttccttgtcggcgctgctaccggcgcccattccttcgaagtgcagctgcttgaaagtggcggcggactgattcagcctggcggatctctgagactgagctgtgccgccagcggcttcaccttttctagccacgccatgacctgggtccgacaggcacctggaaaagggcttgaatgggtgtccgccatcagcggctctggcgattacacacactacgccgacagcgtgaagggcagattcaccatcagcagagacaacagcaagaacaccgtgtacctccagatgaacagcctgagagccgaggacagcgccgtgtattattgcgccaaggatgaggatggcggcagcctgcttggacacagaggacaaggcaccctggtcaccgtttcttccacgcgtatccagaaccctgatcctgccgtgtaccagctgcgggatagcaagagcagcgacaagagcgtgtgtctgttcaccgacttcgacagccagaccaacgtgtcccagagcaaggactccgacgtgtacatcaccgataagtgcgtgctggacatgcggagcatggacttcaagagcaactccgccgtggcctggtccaacaagtccgatttcgcctgcgccaacgccttcaacaacagcattatccccgaggacacattcttcccaagccccgagagcagctgcgacgtgaagctggtggaaaagagcttcgagacagacaccaacctgaacttccagaacctgagcgtgatcggcttcagaatcctgctgctgaaagtggccggctttaacctgctgatgaccctgcggctgtggtccagccgcgccaagagaagcggatctggcgtgaagcagaccctgaatttcgacctgctgaagctggctggcgacgtggaatccaacccaggcccttctagaggccatatgaccgagtacaagcccacggtgcgcctcgccacccgcgacgacgtccccagggccgtacgcaccctcgccgccgcgttcgccgactaccccgccacgcgccacaccgtcgatccggaccgccacatcgagcgggtcaccgagctgcaagaactcttcctcacgcgcgtcgggctcgacatcggcaaggtgtgggtcgcggacgacggcgccgcggtggcggtctggaccacgccggagagcgtcgaagcgggggcggtgttcgccgagatcggcccgcgcatggccgagttgagcggttcccggctggccgcgcagcaacagatggaaggcctcctggcgccgcaccggcccaaggagcccgcgtggttcctggccaccgtcggcgtctcgcccgaccaccagggcaagggtctgggcagcgccgtcgtgctccccggagtggaggcggccgagcgcgccggggtgcccgccttcctggagacctccgcgccccgcaacctccccttctacgagcggctcggcttcaccgtcaccgccgacgtcgaggtgcccgaaggaccgcgcacctggtgcatgacccgcaagcccggtgcctga

SEQ ID NO: 21991 - DNA, 2607 bp, Artificial Sequence
  Synthetic Polynucleotide
atggccttaccagtgaccgccttgctcctgccgctggccttgctgctccacgccgccaggccggaggttcagctgcttgagtctggcggaggactggttcaacctggcggaagcctgagactgtcttgtgccgccagcggcttcacctttagcagctacgccatgagctgggtccgacaggctcctggcaaaggactggaatgggtgtccagcatcagcggcagcggcgactacatctactacgccgatagcgtgaagggcagattcaccatcagccgggacatcagcaagaacaccctgtacctccagatgaacagcctgagagccgaggacaccgccgtgtactactgtgccaaagaaggcaccggcgctaacagcagcctggccgattatagaggccagggcacactggtcaccgtgtctagtctcgaggacctgaagaacgtgttcccacctgaggtggccgtgttcgagcctagcgaggccgagatcagccacacccagaaagccaccctcgtgtgcctggctaccggcttctaccccgaccatgtggaactgtcttggtgggtcaacggcaaagaggtgcacagcggcgtgtgtaccgacccccagccactgaaagaacagcccgccctgaacgacagccggtactgcctgagcagcagactgagagtgtccgccaccttctggcagaacccccggaaccacttcagatgccaggtgcagttctacggcctgagcgagaacgacgagtggacccaggacagagccaagcccgtgacccagatcgtgtctgccgaagcctggggcagagccgattgcggctttaccagcgagagctaccagcagggcgtgctgagcgccaccatcctgtacgagatcctgctgggcaaggccaccctgtacgccgtgctggtgtctgccctggtgctgatggctatggtcaagcggaaggacagccggggaagggccaagcgatctggatctggagcaacaaacttctcactactcaaacaagcaggtgacgtggaggagaatcccgggcctactagtatggactggatttggcgcatccttttccttgtcggcgctgctaccggcgcccattccttcgaagaggttcagctgcttgagtctggcggaggactggttcaacctggcggaagcctgagactgtcttgtgccgccagcggcttcacctttagcagctacgccatgagctgggtccgacaggctcctggcaaaggactggaatgggtgtccagcatcagcggcagcggcgactacatctactacgccgatagcgtgaagggcagattcaccatcagccgggacatcagcaagaacaccctgtacctccagatgaacagcctgagagccgaggacaccgccgtgtactactgtgccaaagaaggcaccggcgctaacagcagcctggccgattatagaggccagggcacactggtcaccgtgtctagtacgcgtatccagaaccctgatcctgccgtgtaccagctgcgggatagcaagagcagcgacaagagcgtgtgtctgttcaccgacttcgacagccagaccaacgtgtcccagagcaaggactccgacgtgtacatcaccgataagtgcgtgctggacatgcggagcatggacttcaagagcaactccgccgtggcctggtccaacaagtccgatttcgcctgcgccaacgccttcaacaacagcattatccccgaggacacattcttcccaagccccgagagcagctgcgacgtgaagctggtggaaaagagcttcgagacagacaccaacctgaacttccagaacctgagcgtgatcggcttcagaatcctgctgctgaaagtggccggctttaacctgctgatgaccctgcggctgtggtccagccgcgccaagagaagcggatctggcgtgaagcagaccctgaatttcgacctgctgaagctggctggcgacgtggaatccaacccaggcccttctagaggccatatgaccgagtacaagcccacggtgcgcctcgccacccgcgacgacgtccccagggccgtacgcaccctcgccgccgcgttcgccgactaccccgccacgcgccacaccgtcgatccggaccgccacatcgagcgggtcaccgagctgcaagaactcttcctcacgcgcgtcgggctcgacatcggcaaggtgtgggtcgcggacgacggcgccgcggtggcggtctggaccacgccggagagcgtcgaagcgggggcggtgttcgccgagatcggcccgcgcatggccgagttgagcggttcccggctggccgcgcagcaacagatggaaggcctcctggcgccgcaccggcccaaggagcccgcgtggttcctggccaccgtcggcgtctcgcccgaccaccagggcaagggtctgggcagcgccgtcgtgctccccggagtggaggcggccgagcgcgccggggtgcccgccttcctggagacctccgcgccccgcaacctccccttctacgagcggctcggcttcaccgtcaccgccgacgtcgaggtgcccgaaggaccgcgcacctggtgcatgacccgcaagcccggtgcctga

SEQ ID NO: 21992 - DNA, 2571 bp, Artificial Sequence
  Synthetic Polynucleotide
atggccttaccagtgaccgccttgctcctgccgctggccttgctgctccacgccgccaggccgcagctccagctgcaagagtctggacctggcctggtcaagcctagcgagacactgagcctgacctgtaccgtgtccggcgatagcatcagcagcggcgattactactggggctggatcagacagcctcctggcaaaggactggaatggatcggccacatctactacagcggcgtgacctactacaaccccagcctgaagtccagagtgaccatcagcgtggacaccagccggaaccagttctccctgaagctgtctagcgtgacagccgccgataccgccgtgtactactgcaccagagaggacagcagcaactggcggagtagaggccagggaacactggtcacagttagctctctcgaggacctgaagaacgtgttcccacctgaggtggccgtgttcgagcctagcgaggccgagatcagccacacccagaaagccaccctcgtgtgcctggctaccggcttctaccccgaccatgtggaactgtcttggtgggtcaacggcaaagaggtgcacagcggcgtgtgtaccgacccccagccactgaaagaacagcccgccctgaacgacagccggtactgcctgagcagcagactgagagtgtccgccaccttctggcagaacccccggaaccacttcagatgccaggtgcagttctacggcctgagcgagaacgacgagtggacccaggacagagccaagcccgtgacccagatcgtgtctgccgaagcctggggcagagccgattgcggctttaccagcgagagctaccagcagggcgtgctgagcgccaccatcctgtacgagatcctgctgggcaaggccaccctgtacgccgtgctggtgtctgccctggtgctgatggctatggtcaagcggaaggacagccggggaagggccaagcgatctggatctggagcaacaaacttctcactactcaaacaagcaggtgacgtggaggagaatcccgggcctactagtatggactggatttggcgcatccttttccttgtcggcgctgctaccggcgcgcattccttcgaagttcagctgctggaatctggcggaggactcgttcaacctggcggctctctgagactgagctgtgccgcttctggcttcagcttctctagctacgccctgagctgggttcgacaagctcccggaaagggccttgaatgggtgtccagcatcggcgagaatgacggcaccacagactatgccgatgccgtgaaaggccggtttaccatcagcagagacaattccaagaacacgctctatctgcaaatgaactccctgcgcgtggaagatacagccgtgtattattgcgtgaaggacggcgtgcactggggacagggaaccctggttacagtgtctagcacgcgtatccagaaccctgatcctgccgtgtaccagctgcgggatagcaagagcagcgacaagagcgtgtgtctgttcaccgacttcgacagccagaccaacgtgtcccagagcaaggactccgacgtgtacatcaccgataagtgcgtgctggacatgcggagcatggacttcaagagcaactccgccgtggcctggtccaacaagtccgatttcgcctgcgccaacgccttcaacaacagcattatccccgaggacacattcttcccaagccccgagagcagctgcgacgtgaagctggtggaaaagagcttcgagacagacaccaacctgaacttccagaacctgagcgtgatcggcttcagaatcctgctgctgaaagtggccggctttaacctgctgatgaccctgcggctgtggtccagccgcgccaagagaagcggatctggcgtgaagcagaccctgaatttcgacctgctgaagctggctggcgacgtggaatccaacccaggcccttctagaggccatatgaccgagtacaagcccacggtgcgcctcgccacccgcgacgacgtccccagggccgtacgcaccctcgccgccgcgttcgccgactaccccgccacgcgccacaccgtcgatccggaccgccacatcgagcgggtcaccgagctgcaagaactcttcctcacgcgcgtcgggctcgacatcggcaaggtgtgggtcgcggacgacggcgccgcggtggcggtctggaccacgccggagagcgtcgaagcgggggcggtgttcgccgagatcggcccgcgcatggccgagttgagcggttcccggctggccgcgcagcaacagatggaaggcctcctggcgccgcaccggcccaaggagcccgcgtggttcctggccaccgtcggcgtctcgcccgaccaccagggcaagggtctgggcagcgccgtcgtgctccccggagtggaggcggccgagcgcgccggggtgcccgccttcctggagacctccgcgccccgcaacctccccttctacgagcggctcggcttcaccgtcaccgccgacgtcgaggtgcccgaaggaccgcgcacctggtgcatgacccgcaagcccggtgcctga

SEQ ID NO: 21993 - DNA, 2589 bp, Artificial Sequence
  Synthetic Polynucleotide
atggccttaccagtgaccgccttgctcctgccgctggccttgctgctccacgccgccaggccgcagctccagctgcaagagtctggacctggcctggtcaagcctagcgagacactgagcctgacctgtaccgtgtccggcgatagcatcagcagcggcgattactactggggctggatcagacagcctcctggcaaaggactggaatggatcggccacatctactacagcggcgtgacctactacaaccccagcctgaagtccagagtgaccatcagcgtggacaccagccggaaccagttctccctgaagctgtctagcgtgacagccgccgataccgccgtgtactactgcaccagagaggacagcagcaactggcggagtagaggccagggaacactggtcacagttagctctctcgaggacctgaagaacgtgttcccacctgaggtggccgtgttcgagcctagcgaggccgagatcagccacacccagaaagccaccctcgtgtgcctggctaccggcttctaccccgaccatgtggaactgtcttggtgggtcaacggcaaagaggtgcacagcggcgtgtgtaccgacccccagccactgaaagaacagcccgccctgaacgacagccggtactgcctgagcagcagactgagagtgtccgccaccttctggcagaacccccggaaccacttcagatgccaggtgcagttctacggcctgagcgagaacgacgagtggacccaggacagagccaagcccgtgacccagatcgtgtctgccgaagcctggggcagagccgattgcggctttaccagcgagagctaccagcagggcgtgctgagcgccaccatcctgtacgagatcctgctgggcaaggccaccctgtacgccgtgctggtgtctgccctggtgctgatggctatggtcaagcggaaggacagccggggaagggccaagcgatctggatctggagcaacaaacttctcactactcaaacaagcaggtgacgtggaggagaatcccgggcctactagtatggactggatttggcgcatccttttccttgtcggcgctgctaccggcgcgcattccttcgaacagctccagttgcaagagagcggccctggcttggtaaaaccttccgagacccttagcctcacatgcacggttagtgggggcagcatttcctcaggtgattactattggggatggattcggcaacccccgggtaaaggattggagtggattggtcatatttattatagtggagcgacgtactacaacccaagtctcaaatccagggttacaatatccgtcgatacgagcaggaaccaattcagcttgaaactttctagtgtcaccgcagcagacacagccgtctattactgtacgcgggatgactccagtaattggcggtcccgagggcaagggacactggtcacggtctcctcaacgcgtatccagaaccctgatcctgccgtgtaccagctgcgggatagcaagagcagcgacaagagcgtgtgtctgttcaccgacttcgacagccagaccaacgtgtcccagagcaaggactccgacgtgtacatcaccgataagtgcgtgctggacatgcggagcatggacttcaagagcaactccgccgtggcctggtccaacaagtccgatttcgcctgcgccaacgccttcaacaacagcattatccccgaggacacattcttcccaagccccgagagcagctgcgacgtgaagctggtggaaaagagcttcgagacagacaccaacctgaacttccagaacctgagcgtgatcggcttcagaatcctgctgctgaaagtggccggctttaacctgctgatgaccctgcggctgtggtccagccgcgccaagagaagcggatctggcgtgaagcagaccctgaatttcgacctgctgaagctggctggcgacgtggaatccaacccaggcccttctagaggccatatgaccgagtacaagcccacggtgcgcctcgccacccgcgacgacgtccccagggccgtacgcaccctcgccgccgcgttcgccgactaccccgccacgcgccacaccgtcgatccggaccgccacatcgagcgggtcaccgagctgcaagaactcttcctcacgcgcgtcgggctcgacatcggcaaggtgtgggtcgcggacgacggcgccgcggtggcggtctggaccacgccggagagcgtcgaagcgggggcggtgttcgccgagatcggcccgcgcatggccgagttgagcggttcccggctggccgcgcagcaacagatggaaggcctcctggcgccgcaccggcccaaggagcccgcgtggttcctggccaccgtcggcgtctcgcccgaccaccagggcaagggtctgggcagcgccgtcgtgctccccggagtggaggcggccgagcgcgccggggtgcccgccttcctggagacctccgcgccccgcaacctccccttctacgagcggctcggcttcaccgtcaccgccgacgtcgaggtgcccgaaggaccgcgcacctggtgcatgacccgcaagcccggtgcctga

SEQ ID NO: 21994 - DNA, 2598 bp, Artificial Sequence
  Synthetic Polynucleotide
atggccttaccagtgaccgccttgctcctgccgctggccttgctgctccacgccgccaggccgcaggtgcagctggttgaatctggcggaggactggttcagcctggcggatctctgagactgtcttgtgccgccagcggcttcaccttcaccaatcacgccatgagctgggtccgacaggcccctggaaaaggactggaactggtgtctagcatcagcggcaacggcagaaccacctactacgccgatagcgtgaagggcagattcaccatcagccgggacatcagcaagaacaccctggacctccagatgaacagcctgagagccgaggataccgccgtgtactactgtgccaaggatggcggagagacactggtggatagcagaggccagggcacactggtcacagtgtcatctctcgaggacctgaagaacgtgttcccacctgaggtggccgtgttcgagcctagcgaggccgagatcagccacacccagaaagccaccctcgtgtgcctggctaccggcttctaccccgaccatgtggaactgtcttggtgggtcaacggcaaagaggtgcacagcggcgtgtgtaccgacccccagccactgaaagaacagcccgccctgaacgacagccggtactgcctgagcagcagactgagagtgtccgccaccttctggcagaacccccggaaccacttcagatgccaggtgcagttctacggcctgagcgagaacgacgagtggacccaggacagagccaagcccgtgacccagatcgtgtctgccgaagcctggggcagagccgattgcggctttaccagcgagagctaccagcagggcgtgctgagcgccaccatcctgtacgagatcctgctgggcaaggccaccctgtacgccgtgctggtgtctgccctggtgctgatggctatggtcaagcggaaggacagccggggaagggccaagcgatctggatctggagcaacaaacttctcactactcaaacaagcaggtgacgtggaggagaatcccgggcctactagtatggactggatttggcgcatccttttccttgtcggcgctgctaccggcgcgcattccttcgaagttcagctgcttgagtctggcggaggactggttcaacctggcggaagcctgagactgtcttgtgccgccagcggcttcatcttcagcagctacgccatgagctgggtccgacaggctcctggaaagggccaagaatgggtttccggcgttagcggcacaggcgtgaacacctactacgccgatagcgtgaagggcagattcaccatcagccgggacaacagcaagaacaccctgtacctccagatgaacagcctgagagccgaggacaccgccgtgtactattgtgcctctggcaaaggctgggacagcggctcttggtacgaggactatagaggccagggcaccctggtcacagtttcttcaacgcgtatccagaaccctgatcctgccgtgtaccagctgcgggatagcaagagcagcgacaagagcgtgtgtctgttcaccgacttcgacagccagaccaacgtgtcccagagcaaggactccgacgtgtacatcaccgataagtgcgtgctggacatgcggagcatggacttcaagagcaactccgccgtggcctggtccaacaagtccgatttcgcctgcgccaacgccttcaacaacagcattatccccgaggacacattcttcccaagccccgagagcagctgcgacgtgaagctggtggaaaagagcttcgagacagacaccaacctgaacttccagaacctgagcgtgatcggcttcagaatcctgctgctgaaagtggccggctttaacctgctgatgaccctgcggctgtggtccagccgcgccaagagaagcggatctggcgtgaagcagaccctgaatttcgacctgctgaagctggctggcgacgtggaatccaacccaggcccttctagaggccatatgaccgagtacaagcccacggtgcgcctcgccacccgcgacgacgtccccagggccgtacgcaccctcgccgccgcgttcgccgactaccccgccacgcgccacaccgtcgatccggaccgccacatcgagcgggtcaccgagctgcaagaactcttcctcacgcgcgtcgggctcgacatcggcaaggtgtgggtcgcggacgacggcgccgcggtggcggtctggaccacgccggagagcgtcgaagcgggggcggtgttcgccgagatcggcccgcgcatggccgagttgagcggttcccggctggccgcgcagcaacagatggaaggcctcctggcgccgcaccggcccaaggagcccgcgtggttcctggccaccgtcggcgtctcgcccgaccaccagggcaagggtctgggcagcgccgtcgtgctccccggagtggaggcggccgagcgcgccggggtgcccgccttcctggagacctccgcgccccgcaacctccccttctacgagcggctcggcttcaccgtcaccgccgacgtcgaggtgcccgaaggaccgcgcacctggtgcatgacccgcaagcccggtgcctga

SEQ ID NO: 21995 - DNA, 2598 bp, Artificial Sequence
  Synthetic Polynucleotide
atggccttaccagtgaccgccttgctcctgccgctggccttgctgctccacgccgccaggccgcagctccagctgcaagagtctggacctggcctggtcaagcctagcgagacactgagcctgacctgtaccgtgtccggcgatagcatcagcagcggcgattactactggggctggatcagacagcctcctggcaaaggactggaatggatcggccacatctactacagcggcgtgacctactacaaccccagcctgaagtccagagtgaccatcagcgtggacaccagccggaaccagttctccctgaagctgtctagcgtgacagccgccgataccgccgtgtactactgcaccagagaggacagcagcaactggcggagtagaggccagggaacactggtcacagttagctctctcgaggacctgaagaacgtgttcccacctgaggtggccgtgttcgagcctagcgaggccgagatcagccacacccagaaagccaccctcgtgtgcctggctaccggcttctaccccgaccatgtggaactgtcttggtgggtcaacggcaaagaggtgcacagcggcgtgtgtaccgacccccagccactgaaagaacagcccgccctgaacgacagccggtactgcctgagcagcagactgagagtgtccgccaccttctggcagaacccccggaaccacttcagatgccaggtgcagttctacggcctgagcgagaacgacgagtggacccaggacagagccaagcccgtgacccagatcgtgtctgccgaagcctggggcagagccgattgcggctttaccagcgagagctaccagcagggcgtgctgagcgccaccatcctgtacgagatcctgctgggcaaggccaccctgtacgccgtgctggtgtctgccctggtgctgatggctatggtcaagcggaaggacagccggggaagggccaagcgatctggatctggagcaacaaacttctcactactcaaacaagcaggtgacgtggaggagaatcccgggcctactagtatggactggatttggcgcatccttttccttgtcggcgctgctaccggcgcgcattccttcgaagttcagctgcttgaaagcggtggcggcctggttcaacctggcggatctctgagactgagctgtgccgccagcggcttcatcttctccatctacgccatgtcctgggtccgacaggcccctggaaaaggactggaatgggtgtccggcatctctggcagcggcgtgaacacctactacgccgattctgtgaagggccgcttcatcatcagccgggacaacagcagaaacaccgtgtacctccagatgaacagcctgagagccgatgacaccgccgtgtaccactgcgccaatggcaaaggctgggacggcaacacttggtacgaggattacagaggacagggaaccctcgtgaccgtgtctagtacgcgtatccagaaccctgatcctgccgtgtaccagctgcgggatagcaagagcagcgacaagagcgtgtgtctgttcaccgacttcgacagccagaccaacgtgtcccagagcaaggactccgacgtgtacatcaccgataagtgcgtgctggacatgcggagcatggacttcaagagcaactccgccgtggcctggtccaacaagtccgatttcgcctgcgccaacgccttcaacaacagcattatccccgaggacacattcttcccaagccccgagagcagctgcgacgtgaagctggtggaaaagagcttcgagacagacaccaacctgaacttccagaacctgagcgtgatcggcttcagaatcctgctgctgaaagtggccggctttaacctgctgatgaccctgcggctgtggtccagccgcgccaagagaagcggatctggcgtgaagcagaccctgaatttcgacctgctgaagctggctggcgacgtggaatccaacccaggcccttctagaggccatatgaccgagtacaagcccacggtgcgcctcgccacccgcgacgacgtccccagggccgtacgcaccctcgccgccgcgttcgccgactaccccgccacgcgccacaccgtcgatccggaccgccacatcgagcgggtcaccgagctgcaagaactcttcctcacgcgcgtcgggctcgacatcggcaaggtgtgggtcgcggacgacggcgccgcggtggcggtctggaccacgccggagagcgtcgaagcgggggcggtgttcgccgagatcggcccgcgcatggccgagttgagcggttcccggctggccgcgcagcaacagatggaaggcctcctggcgccgcaccggcccaaggagcccgcgtggttcctggccaccgtcggcgtctcgcccgaccaccagggcaagggtctgggcagcgccgtcgtgctccccggagtggaggcggccgagcgcgccggggtgcccgccttcctggagacctccgcgccccgcaacctccccttctacgagcggctcggcttcaccgtcaccgccgacgtcgaggtgcccgaaggaccgcgcacctggtgcatgacccgcaagcccggtgcctga

SEQ ID NO: 21996 - DNA, 2598 bp, Artificial Sequence
  Synthetic Polynucleotide
atggccttaccagtgaccgccttgctcctgccgctggccttgctgctccacgccgccaggccgcaggtgcagctggttgaatctggcggaggactggttcagcctggcggatctctgagactgtcttgtgccgccagcggcttcaccttcaccaatcacgccatgagctgggtccgacaggcccctggaaaaggactggaactggtgtctagcatcagcggcaacggcagaaccacctactacgccgatagcgtgaagggcagattcaccatcagccgggacatcagcaagaacaccctggacctccagatgaacagcctgagagccgaggataccgccgtgtactactgtgccaaggatggcggagagacactggtggatagcagaggccagggcacactggtcacagtgtcatctctcgaggacctgaagaacgtgttcccacctgaggtggccgtgttcgagcctagcgaggccgagatcagccacacccagaaagccaccctcgtgtgcctggctaccggcttctaccccgaccatgtggaactgtcttggtgggtcaacggcaaagaggtgcacagcggcgtgtgtaccgacccccagccactgaaagaacagcccgccctgaacgacagccggtactgcctgagcagcagactgagagtgtccgccaccttctggcagaacccccggaaccacttcagatgccaggtgcagttctacggcctgagcgagaacgacgagtggacccaggacagagccaagcccgtgacccagatcgtgtctgccgaagcctggggcagagccgattgcggctttaccagcgagagctaccagcagggcgtgctgagcgccaccatcctgtacgagatcctgctgggcaaggccaccctgtacgccgtgctggtgtctgccctggtgctgatggctatggtcaagcggaaggacagccggggaagggccaagcgatctggatctggagcaacaaacttctcactactcaaacaagcaggtgacgtggaggagaatcccgggcctactagtatggactggatttggcgcatccttttccttgtcggcgctgctaccggcgcgcattccttcgaagttcagctgcttgaaagcggtggcggcctggttcaacctggcggatctctgagactgagctgtgccgccagcggcttcatcttctccatctacgccatgtcctgggtccgacaggcccctggaaaaggactggaatgggtgtccggcatctctggcagcggcgtgaacacctactacgcccattctgtgaagggccgcttcatcatcagccgggacaacagcagaaacaccgtgtacctccagatgaacagcctgagagccgatgacaccgccgtgtaccactgcgccaatggcaaaggctgggacggcaacacttggtacgaggattacagaggacagggaaccctcgtgaccgtgtctagtacgcgtatccagaaccctgatcctgccgtgtaccagctgcgggatagcaagagcagcgacaagagcgtgtgtctgttcaccgacttcgacagccagaccaacgtgtcccagagcaaggactccgacgtgtacatcaccgataagtgcgtgctggacatgcggagcatggacttcaagagcaactccgccgtggcctggtccaacaagtccgatttcgcctgcgccaacgccttcaacaacagcattatccccgaggacacattcttcccaagccccgagagcagctgcgacgtgaagctggtggaaaagagcttcgagacagacaccaacctgaacttccagaacctgagcgtgatcggcttcagaatcctgctgctgaaagtggccggctttaacctgctgatgaccctgcggctgtggtccagccgcgccaagagaagcggatctggcgtgaagcagaccctgaatttcgacctgctgaagctggctggcgacgtggaatccaacccaggcccttctagaggccatatgaccgagtacaagcccacggtgcgcctcgccacccgcgacgacgtccccagggccgtacgcaccctcgccgccgcgttcgccgactaccccgccacgcgccacaccgtcgatccggaccgccacatcgagcgggtcaccgagctgcaagaactcttcctcacgcgcgtcgggctcgacatcggcaaggtgtgggtcgcggacgacggcgccgcggtggcggtctggaccacgccggagagcgtcgaagcgggggcggtgttcgccgagatcggcccgcgcatggccgagttgagcggttcccggctggccgcgcagcaacagatggaaggcctcctggcgccgcaccggcccaaggagcccgcgtggttcctggccaccgtcggcgtctcgcccgaccaccagggcaagggtctgggcagcgccgtcgtgctccccggagtggaggcggccgagcgcgccggggtgcccgccttcctggagacctccgcgccccgcaacctccccttctacgagcggctcggcttcaccgtcaccgccgacgtcgaggtgcccgaaggaccgcgcacctggtgcatgacccgcaagcccggtgcctga

SEQ ID NO: 21997 - DNA, 2607 bp, Artificial Sequence
  Synthetic Polynucleotide
atggccttaccagtgaccgccttgctcctgccgctggccttgctgctccacgccgccaggccgcagctgcaactgcaagagtctggccccggactggtcaagccttctgaaacactggccctgacctgcaatgtgtccggcggctctatcagcagcagctcctattactggggctggatcagacagcctccaggcaagagactggaatggatcggcagcatctactacagcggcagcacatacttcaaccccagcctgaagtccagagtgaccatcagcgtggacacctccaagaaccagttctccctgaagctgagcagcgtgacagccgccgatacagccgtgtattactgtgctggcggcgactactatggccccgttggacaatggcccagcgattacagaggacagggaacccttgtgaccgtgtcctctctcgaggacctgaagaacgtgttcccacctgaggtggccgtgttcgagcctagcgaggccgagatcagccacacccagaaagccaccctcgtgtgcctggctaccggcttctaccccgaccatgtggaactgtcttggtgggtcaacggcaaagaggtgcacagcggcgtgtgtaccgacccccagccactgaaagaacagcccgccctgaacgacagccggtactgcctgagcagcagactgagagtgtccgccaccttctggcagaacccccggaaccacttcagatgccaggtgcagttctacggcctgagcgagaacgacgagtggacccaggacagagccaagcccgtgacccagatcgtgtctgccgaagcctggggcagagccgattgcggctttaccagcgagagctaccagcagggcgtgctgagcgccaccatcctgtacgagatcctgctgggcaaggccaccctgtacgccgtgctggtgtctgccctggtgctgatggctatggtcaagcggaaggacagccggggaagggccaagcgatctggatctggagcaacaaacttctcactactcaaacaagcaggtgacgtggaggagaatcccgggcctactagtatggactggatttggcgcatccttttccttgtcggcgctgctaccggcgcgcattccttcgaacaggtgcagctggttgaatctggcggaggactggttcagcctggcggatctctgagactgtcttgtgccgccagcggcttcaccttcaccaatcacgccatgagctgggtccgacaggcccctggaaaaggactggaactggtgtctagcatcagcggcaacggcagaaccacctactacgccgatagcgtgaagggcagattcaccatcagccgggacatcagcaagaacaccctggacctccagatgaacagcctgagagccgaggataccgccgtgtactactgtgccaaggatggcggagagacactggtggatagcagaggccagggcacactggtcacagtgtcatctacgcgtatccagaaccctgatcctgccgtgtaccagctgcgggatagcaagagcagcgacaagagcgtgtgtctgttcaccgacttcgacagccagaccaacgtgtcccagagcaaggactccgacgtgtacatcaccgataagtgcgtgctggacatgcggagcatggacttcaagagcaactccgccgtggcctggtccaacaagtccgatttcgcctgcgccaacgccttcaacaacagcattatccccgaggacacattcttcccaagccccgagagcagctgcgacgtgaagctggtggaaaagagcttcgagacagacaccaacctgaacttccagaacctgagcgtgatcggcttcagaatcctgctgctgaaagtggccggctttaacctgctgatgaccctgcggctgtggtccagccgcgccaagagaagcggatctggcgtgaagcagaccctgaatttcgacctgctgaagctggctggcgacgtggaatccaacccaggcccttctagaggccatatgaccgagtacaagcccacggtgcgcctcgccacccgcgacgacgtccccagggccgtacgcaccctcgccgccgcgttcgccgactaccccgccacgcgccacaccgtcgatccggaccgccacatcgagcgggtcaccgagctgcaagaactcttcctcacgcgcgtcgggctcgacatcggcaaggtgtgggtcgcggacgacggcgccgcggtggcggtctggaccacgccggagagcgtcgaagcgggggcggtgttcgccgagatcggcccgcgcatggccgagttgagcggttcccggctggccgcgcagcaacagatggaaggcctcctggcgccgcaccggcccaaggagcccgcgtggttcctggccaccgtcggcgtctcgcccgaccaccagggcaagggtctgggcagcgccgtcgtgctccccggagtggaggcggccgagcgcgccggggtgcccgccttcctggagacctccgcgccccgcaacctccccttctacgagcggctcggcttcaccgtcaccgccgacgtcgaggtgcccgaaggaccgcgcacctggtgcatgacccgcaagcccggtgcctga

SEQ ID NO: 21998 - DNA, 2601 bp, Artificial Sequence
  Synthetic Polynucleotide
atggactggatttggcgcatccttttccttgtcggcgctgctaccggcgcccattcccagctccagctgcaagagtctggacctggcctggtcaagcctagcgagacactgagcctgacctgtacagttagcggcggctctgtgtccagcagcagctattactggggctggatcagacagcctcctggcaagagactggaactgatcggcagcatctactacggcggctccacctacttcaaccccagcctgaaaaccagagtgaccatcagcgtggacaccagcaagaaccagttcagcctgaagctgagcagcgttacagccgccgatacagccgtgtactattgtgccggcggagacacatacggccctgttggacaatggcccagcgactatagaggccagggcacactggtcacagtgtctagcctcgaggacctgaagaacgtgttcccacctgaggtggccgtgttcgagcctagcgaggccgagatcagccacacccagaaagccaccctcgtgtgcctggctaccggcttctaccccgaccatgtggaactgtcttggtgggtcaacggcaaagaggtgcacagcggcgtgtgtaccgacccccagccactgaaagaacagcccgccctgaacgacagccggtactgcctgagcagcagactgagagtgtccgccaccttctggcagaacccccggaaccacttcagatgccaggtgcagttctacggcctgagcgagaacgacgagtggacccaggacagagccaagcccgtgacccagatcgtgtctgccgaagcctggggcagagccgattgcggctttaccagcgagagctaccagcagggcgtgctgagcgccaccatcctgtacgagatcctgctgggcaaggccaccctgtacgccgtgctggtgtctgccctggtgctgatggctatggtcaagcggaaggacagccggggaagggccaagcgatctggatctggagcaacaaacttctcactactcaaacaagcaggtgacgtggaggagaatcccgggcctactagtatggactggatttggcgcatccttttccttgtcggcgctgctaccggcgcgcattccttcgaacaggtgcagctggttgaatctggcggaggactggttcagcctggcggatctctgagactgtcttgtgccgccagcggcttcaccttcaccaatcacgccatgagctgggtccgacaggcccctggaaaaggactggaactggtgtctagcatcagcggcaacggcagaaccacctactacgccgatagcgtgaagggcagattcaccatcagccgggacatcagcaagaacaccctggacctccagatgaacagcctgagagccgaggataccgccgtgtactactgtgccaaggatggcggagagacactggtggatagcagaggccagggcacactggtcacagtgtcatctacgcgtatccagaaccctgatcctgccgtgtaccagctgcgggatagcaagagcagcgacaagagcgtgtgtctgttcaccgacttcgacagccagaccaacgtgtcccagagcaaggactccgacgtgtacatcaccgataagtgcgtgctggacatgcggagcatggacttcaagagcaactccgccgtggcctggtccaacaagtccgatttcgcctgcgccaacgccttcaacaacagcattatccccgaggacacattcttcccaagccccgagagcagctgcgacgtgaagctggtggaaaagagcttcgagacagacaccaacctgaacttccagaacctgagcgtgatcggcttcagaatcctgctgctgaaagtggccggctttaacctgctgatgaccctgcggctgtggtccagccgcgccaagagaagcggatctggcgtgaagcagaccctgaatttcgacctgctgaagctggctggcgacgtggaatccaacccaggcccttctagaggccatatgaccgagtacaagcccacggtgcgcctcgccacccgcgacgacgtccccagggccgtacgcaccctcgccgccgcgttcgccgactaccccgccacgcgccacaccgtcgatccggaccgccacatcgagcgggtcaccgagctgcaagaactcttcctcacgcgcgtcgggctcgacatcggcaaggtgtgggtcgcggacgacggcgccgcggtggcggtctggaccacgccggagagcgtcgaagcgggggcggtgttcgccgagatcggcccgcgcatggccgagttgagcggttcccggctggccgcgcagcaacagatggaaggcctcctggcgccgcaccggcccaaggagcccgcgtggttcctggccaccgtcggcgtctcgcccgaccaccagggcaagggtctgggcagcgccgtcgtgctccccggagtggaggcggccgagcgcgccggggtgcccgccttcctggagacctccgcgccccgcaacctccccttctacgagcggctcggcttcaccgtcaccgccgacgtcgaggtgcccgaaggaccgcgcacctggtgcatgacccgcaagcccggtgcctga

SEQ ID NO: 21999 - DNA, 2736 bp, Artificial Sequence
  Synthetic Polynucleotide
atggccttaccagtgaccgccttgctcctgccgctggccttgctgctccacgccgccaggccgctcgaggggaaaccaattcccaaccctcttctgggactggattcaaccggcagcggcgaggacctgaagaacgtgttcccacctgaggtggccgtgttcgagcctagcaaggccgagatcgcccacacccagaaagccaccctcgtgtgcctggctaccggcttctaccccgaccatgtggaactgtcttggtgggtcaacggcaaagaggtgcacagcggcgtgtgtaccgacccccagccactgaaagaacagcccgccctgaacgacagccggtactgcctgagcagcagactgagagtgtccgccaccttctggcagaacccccggaaccacttcagatgccaggtgcagttctacggcctgagcgagaacgacgagtggacccaggacagagccaagcccgtgacccagatcgtgtctgccgaagcctggggcagagccgattgcggcatcaccagcgccagctaccaccagggcgtgctgagcgccaccatcctgtacgagatcctgctgggcaaggccaccctgtacgccgtgctggtgtctgccctggtgctgatggctatggtcaagcggaaggacagccggggaagggccaagcgatctggatctggagcaacaaacttctcactactcaaacaagcaggtgacgtggaggagaatcccgggcctactagtaccatggactggatttggcgcatccttttccttgtcggcgctgctaccggcgcccattcccagctccagctgcaagagtctggacctggcctggtcaagcctagcgagacactgagcctgacctgtacagttagcggcggctctgtgtccagcagcagctattactggggctggatcagacagcctcctggcaagagactggaactgatcggcagcatctactacggcggctccacctacttcaaccccagcctgaaaagcagagtgaccatcagcgtggacaccagcaagaaccagttcagcctgaaactgagcagcgtgacagccgccgatacagccgtgtactattgtgccggcggagacacatacggccctgttggacaatggcccagcgactatagaggccagggcacactggtcacagtgtctagcggtggcggaggaagtggcggcggatctttcgaagttcagctgcttgaaagcggtggcggcctggttcaacctggcggatctctgagactgagctgtgccgccagcggcttcatcttctccatctacgccatgtcctgggtccgacaggcccctggaaaaggactggaatgggtgtccggcatctctggcagcggcgtgaacacctactacgccgattctgtgaagggccgcttcatcatcagccgggacaacagcagaaacaccgtgtacctccagatgaacagcctgagagccgatgacaccgccgtgtaccactgcgccaatggcaaaggctgggacggcaacacttggtacgaggattacagaggacagggaaccctcgtgaccgtgtctagtacgcgtgagcagaaactgatctcggaagaggatgggagcggcatccagaaccctgatcctgccgtgtaccagctgcgggatagcaagagcagcgacaagagcgtgtgtctgttcaccgacttcgacagccagaccaacgtgtcccagagcaaggactccgacgtgtacatcaccgataagtgcgtgctggacatgcggagcatggacttcaagagcaactccgccgtggcctggtccaacaagtccgatttcgcctgcgccaacgccttcaacaacagcattatccccgaggacacattcttcccaagcagcgacgtgccctgcgacgtgaagctggtggaaaagagcttcgagacagacaccaacctgaacttccagaacctgagcgtgatcggcttcagaatcctgctgctgaaagtggccggctttaacctgctgatgaccctgcggctgtggtccagccgcgccaagagaagcggatctggcgtgaagcagaccctgaatttcgacctgctgaagctggctggcgacgtggaatccaacccaggcccttctagaggccatatgaccgagtacaagcccacggtgcgcctcgccacccgcgacgacgtccccagggccgtacgcaccctcgccgccgcgttcgccgactaccccgccacgcgccacaccgtcgatccggaccgccacatcgagcgggtcaccgagctgcaagaactcttcctcacgcgcgtcgggctcgacatcggcaaggtgtgggtcgcggacgacggcgccgcggtggcggtctggaccacgccggagagcgtcgaagcgggggcggtgttcgccgagatcggcccgcgcatggccgagttgagcggttcccggctggccgcgcagcaacagatggaaggcctcctggcgccgcaccggcccaaggagcccgcgtggttcctggccaccgtcggcgtctcgcccgaccaccagggcaagggtctgggcagcgccgtcgtgctccccggagtggaggcggccgagcgcgccggggtgcccgccttcctggagacctccgcgccccgcaacctccccttctacgagcggctcggcttcaccgtcaccgccgacgtcgaggtgcccgaaggaccgcgcacctggtgcatgacccgcaagcccggtgcctga

SEQ ID NO: 22000 - DNA, 2751 bp, Artificial Sequence
  Synthetic Polynucleotide
atggccttaccagtgaccgccttgctcctgccgctggccttgctgctccacgccgccaggccgctcgaggggaaaccaattcccaaccctcttctgggactggattcaaccggcagcggcgaggacctgaagaacgtgttcccacctgaggtggccgtgttcgagcctagcaaggccgagatcgcccacacccagaaagccaccctcgtgtgcctggctaccggcttctaccccgaccatgtggaactgtcttggtgggtcaacggcaaagaggtgcacagcggcgtgtgtaccgacccccagccactgaaagaacagcccgccctgaacgacagccggtactgcctgagcagcagactgagagtgtccgccaccttctggcagaacccccggaaccacttcagatgccaggtgcagttctacggcctgagcgagaacgacgagtggacccaggacagagccaagcccgtgacccagatcgtgtctgccgaagcctggggcagagccgattgcggcatcaccagcgccagctaccaccagggcgtgctgagcgccaccatcctgtacgagatcctgctgggcaaggccaccctgtacgccgtgctggtgtctgccctggtgctgatggctatggtcaagcggaaggacagccggggaagggccaagcgatctggatctggagcaacaaacttctcactactcaaacaagcaggtgacgtggaggagaatcccgggcctactagcaccatggccttaccagtgaccgccttgctcctgccgctggccttgctgctccacgccgccaggccgcagctgcaactgcaagagtctggccccggactggtcaagccttctgaaacactggccctgacctgcaatgtgtccggcggctctatcagcagcagctcctattactggggctggatcagacagcctccaggcaagagactggaatggatcggcagcatctactacagcggcagcacatacttcaaccccagcctgaagtccagagtgaccatcagcgtggacacctccaagaaccagttctccctgaagctgagcagcgtgacagccgccgatacagccgtgtattactgtgctggcggcgactactatggccccgttggacaatggcccagcgattacagaggacagggaacccttgtgaccgtgtcctctggatccggcggaggcggaagtggaggcggaggatctttcgaagttcagctgcttgagtctggcggaggactggttcaacctggcggaagcctgagactgtcttgtgccgccagcggcttcatcttcagcagctacgccatgagctgggtccgacaggctcctggaaagggccaagaatgggtttccggcgttagcggcacaggcgtgaacacctactacgccgatagcgtgaagggcagattcaccatcagccgggacaacagcaagaacaccctgtacctccagatgaacagcctgagagccgaggacaccgccgtgtactattgtgcctctggcaaaggctgggacagcggctcttggtacgaggactatagaggccagggcaccctggtcacagtttcttcaacgcgtgagcagaaactgatctcggaagaggatgggagcggcatccagaaccctgatcctgccgtgtaccagctgcgggatagcaagagcagcgacaagagcgtgtgtctgttcaccgacttcgacagccagaccaacgtgtcccagagcaaggactccgacgtgtacatcaccgataagtgcgtgctggacatgcggagcatggacttcaagagcaactccgccgtggcctggtccaacaagtccgatttcgcctgcgccaacgccttcaacaacagcattatccccgaggacacattcttcccaagcagcgacgtgccctgcgacgtgaagctggtggaaaagagcttcgagacagacaccaacctgaacttccagaacctgagcgtgatcggcttcagaatcctgctgctgaaagtggccggctttaacctgctgatgaccctgcggctgtggtccagccgcgccaagagaagcggatctggcgtgaagcagaccctgaatttcgacctgctgaagctggctggcgacgtggaatccaacccaggcccttctagaggccatatgaccgagtacaagcccacggtgcgcctcgccacccgcgacgacgtccccagggccgtacgcaccctcgccgccgcgttcgccgactaccccgccacgcgccacaccgtcgatccggaccgccacatcgagcgggtcaccgagctgcaagaactcttcctcacgcgcgtcgggctcgacatcggcaaggtgtgggtcgcggacgacggcgccgcggtggcggtctggaccacgccggagagcgtcgaagcgggggcggtgttcgccgagatcggcccgcgcatggccgagttgagcggttcccggctggccgcgcagcaacagatggaaggcctcctggcgccgcaccggcccaaggagcccgcgtggttcctggccaccgtcggcgtctcgcccgaccaccagggcaagggtctgggcagcgccgtcgtgctccccggagtggaggcggccgagcgcgccggggtgcccgccttcctggagacctccgcgccccgcaacctccccttctacgagcggctcggcttcaccgtcaccgccgacgtcgaggtgcccgaaggaccgcgcacctggtgcatgacccgcaagcccggtgcctga

SEQ ID NO: 22001 - DNA, 2613 bp, Artificial Sequence
  Synthetic Polynucleotide
atggccttaccagtgaccgccttgctcctgccgctggccttgctgctccacgccgccaggccgcagctccagctgcaagagtctggacctggcctggtcaagcctagcgagacactgagcctgacctgtaccgtgtccggcgatagcatcagcagcggcgattactactggggctggatcagacagcctcctggcaaaggactggaatggatcggccacatctactacagcggcgtgacctactacaaccccagcctgaagtccagagtgaccatcagcgtggacaccagccggaaccagttctccctgaagctgtctagcgtgacagccgccgataccgccgtgtactactgcaccagagaggacagcagcaactggcggagtagaggccagggaacactggtcacagttagctctctcgagcctggtggcggaggatctcctgaggacctgaagaacgtgttcccacctgaggtggccgtgttcgagcctagcgaggccgagatcagccacacccagaaagccaccctcgtgtgcctggctaccggcttctaccccgaccatgtggaactgtcttggtgggtcaacggcaaagaggtgcacagcggcgtgtgtaccgacccccagccactgaaagaacagcccgccctgaacgacagccggtactgcctgagcagcagactgagagtgtccgccaccttctggcagaacccccggaaccacttcagatgccaggtgcagttctacggcctgagcgagaacgacgagtggacccaggacagagccaagcccgtgacccagatcgtgtctgccgaagcctggggcagagccgattgcggctttaccagcgagagctaccagcagggcgtgctgagcgccaccatcctgtacgagatcctgctgggcaaggccaccctgtacgccgtgctggtgtctgccctggtgctgatggctatggtcaagcggaaggacagccggggaagggccaagcgatctggatctggagcaacaaacttctcactactcaaacaagcaggtgacgtggaggagaatcccgggcctactagtatggactggatttggcgcatccttttccttgtcggcgctgctaccggcgcgcattccttcgaagtgcagctgcttgaaagtggcggcggactgattcagcctggcggatctctgagactgagctgtgccgccagcggcttcaccttttctagccacgccatgacctgggtccgacaggcacctggaaaagggcttgaatgggtgtccgccatcagcggctctggcgattacacacactacgccgacagcgtgaagggcagattcaccatcagcagagacaacagcaagaacaccgtgtacctccagatgaacagcctgagagccgaggacagcgccgtgtattattgcgccaaggatgaggatggcggcagcctgcttggacacagaggacaaggcaccctggtcaccgtttcttccacgcgtatccagaaccctgatcctgccgtgtaccagctgcgggatagcaagagcagcgacaagagcgtgtgtctgttcaccgacttcgacagccagaccaacgtgtcccagagcaaggactccgacgtgtacatcaccgataagtgcgtgctggacatgcggagcatggacttcaagagcaactccgccgtggcctggtccaacaagtccgatttcgcctgcgccaacgccttcaacaacagcattatccccgaggacacattcttcccaagccccgagagcagctgcgacgtgaagctggtggaaaagagcttcgagacagacaccaacctgaacttccagaacctgagcgtgatcggcttcagaatcctgctgctgaaagtggccggctttaacctgctgatgaccctgcggctgtggtccagccgcgccaagagaagcggatctggcgtgaagcagaccctgaatttcgacctgctgaagctggctggcgacgtggaatccaacccaggcccttctagaggccatatgaccgagtacaagcccacggtgcgcctcgccacccgcgacgacgtccccagggccgtacgcaccctcgccgccgcgttcgccgactaccccgccacgcgccacaccgtcgatccggaccgccacatcgagcgggtcaccgagctgcaagaactcttcctcacgcgcgtcgggctcgacatcggcaaggtgtgggtcgcggacgacggcgccgcggtggcggtctggaccacgccggagagcgtcgaagcgggggcggtgttcgccgagatcggcccgcgcatggccgagttgagcggttcccggctggccgcgcagcaacagatggaaggcctcctggcgccgcaccggcccaaggagcccgcgtggttcctggccaccgtcggcgtctcgcccgaccaccagggcaagggtctgggcagcgccgtcgtgctccccggagtggaggcggccgagcgcgccggggtgcccgccttcctggagacctccgcgccccgcaacctccccttctacgagcggctcggcttcaccgtcaccgccgacgtcgaggtgcccgaaggaccgcgcacctggtgcatgacccgcaagcccggtgcctga

SEQ ID NO: 22002 - DNA, 2328 bp, Artificial Sequence
  Synthetic Polynucleotide
atggccttaccagtgaccgccttgctcctgccgctggccttgctgctccacgccgccaggccgctcgaggggaaaccaattcccaaccctcttctgggactggattcaaccggcagcggcgaggacctgaagaacgtgttcccacctgaggtggccgtgttcgagcctagcaaggccgagatcgcccacacccagaaagccaccctcgtgtgcctggctaccggcttctaccccgaccatgtggaactgtcttggtgggtcaacggcaaagaggtgcacagcggcgtgtgtaccgacccccagccactgaaagaacagcccgccctgaacgacagccggtactgcctgagcagcagactgagagtgtccgccaccttctggcagaacccccggaaccacttcagatgccaggtgcagttctacggcctgagcgagaacgacgagtggacccaggacagagccaagcccgtgacccagatcgtgtctgccgaagcctggggcagagccgattgcggcatcaccagcgccagctaccaccagggcgtgctgagcgccaccatcctgtacgagatcctgctgggcaaggccaccctgtacgccgtgctggtgtctgccctggtgctgatggctatggtcaagcggaaggacagccggggaagggccaagcgatctggatctggagcaacaaacttctcactactcaaacaagcaggtgacgtggaggagaatcccgggcctactagcaccatggccttaccagtgaccgccttgctcctgccgctggccttgctgctccacgccgccaggccgcaggtgcagctggttgaatctggcggaggactggttcagcctggcggatctctgagactgtcttgtgccgccagcggcttcaccttcaccaatcacgccatgagctgggtccgacaggcccctggaaaaggactggaactggtgtctagcatcagcggcaacggcagaaccacctactacgccgatagcgtgaagggcagattcaccatcagccgggacatcagcaagaacaccctggacctccagatgaacagcctgagagccgaggataccgccgtgtactactgtgccaaggatggcggagagacactggtggatagcagaggccagggcacactggtcacagtgtcatctacgcgtgagcagaaactgatctcggaagaggatgggagcggcatccagaaccctgatcctgccgtgtaccagctgcgggatagcaagagcagcgacaagagcgtgtgtctgttcaccgacttcgacagccagaccaacgtgtcccagagcaaggactccgacgtgtacatcaccgataagtgcgtgctggacatgcggagcatggacttcaagagcaactccgccgtggcctggtccaacaagtccgatttcgcctgcgccaacgccttcaacaacagcattatccccgaggacacattcttcccaagcagcgacgtgccctgcgacgtgaagctggtggaaaagagcttcgagacagacaccaacctgaacttccagaacctgagcgtgatcggcttcagaatcctgctgctgaaagtggccggctttaacctgctgatgaccctgcggctgtggtccagccgcgccaagagaagcggatctggcgtgaagcagaccctgaatttcgacctgctgaagctggctggcgacgtggaatccaacccaggcccttctagaggccatatgaccgagtacaagcccacggtgcgcctcgccacccgcgacgacgtccccagggccgtacgcaccctcgccgccgcgttcgccgactaccccgccacgcgccacaccgtcgatccggaccgccacatcgagcgggtcaccgagctgcaagaactcttcctcacgcgcgtcgggctcgacatcggcaaggtgtgggtcgcggacgacggcgccgcggtggcggtctggaccacgccggagagcgtcgaagcgggggcggtgttcgccgagatcggcccgcgcatggccgagttgagcggttcccggctggccgcgcagcaacagatggaaggcctcctggcgccgcaccggcccaaggagcccgcgtggttcctggccaccgtcggcgtctcgcccgaccaccagggcaagggtctgggcagcgccgtcgtgctccccggagtggaggcggccgagcgcgccggggtgcccgccttcctggagacctccgcgccccgcaacctccccttctacgagcggctcggcttcaccgtcaccgccgacgtcgaggtgcccgaaggaccgcgcacctggtgcatgacccgcaagcccggtgcctga

SEQ ID NO: 22003 - DNA, 2721 bp, Artificial Sequence
  Synthetic Polynucleotide
atggccttaccagtgaccgccttgctcctgccgctggccttgctgctccacgccgccaggccgctcgaggggaaaccaattcccaaccctcttctgggactggattcaaccggcagcggcgaggacctgaagaacgtgttcccacctgaggtggccgtgttcgagcctagcaaggccgagatcgcccacacccagaaagccaccctcgtgtgcctggctaccggcttctaccccgaccatgtggaactgtcttggtgggtcaacggcaaagaggtgcacagcggcgtgtgtaccgacccccagccactgaaagaacagcccgccctgaacgacagccggtactgcctgagcagcagactgagagtgtccgccaccttctggcagaacccccggaaccacttcagatgccaggtgcagttctacggcctgagcgagaacgacgagtggacccaggacagagccaagcccgtgacccagatcgtgtctgccgaagcctggggcagagccgattgcggcatcaccagcgccagctaccaccagggcgtgctgagcgccaccatcctgtacgagatcctgctgggcaaggccaccctgtacgccgtgctggtgtctgccctggtgctgatggctatggtcaagcggaaggacagccggggaagggccaagcgatctggatctggagcaacaaacttctcactactcaaacaagcaggtgacgtggaggagaatcccgggcctactagcaccatggccttaccagtgaccgccttgctcctgccgctggccttgctgctccacgccgccaggccgcagctccagctgcaagagtctggacctggcctggtcaagcctagcgagacactgagcctgacctgtaccgtgtccggcgatagcatcagcagcggcgattactactggggctggatcagacagcctcctggcaaaggactggaatggatcggccacatctactacagcggcgtgacctactacaaccccagcctgaagtccagagtgaccatcagcgtggacaccagccggaaccagttctccctgaagctgtctagcgtgacagccgccgataccgccgtgtactactgcaccagagaggacagcagcaactggcggagtagaggccagggaacactggtcacagttagctctctcgagagcggcggaggcggatctttcgaagaggttcagctgcttgagtctggcggaggactggttcaacctggcggaagcctgagactgtcttgtgccgccagcggcttcacctttagcagctacgccatgagctgggtccgacaggctcctggcaaaggactggaatgggtgtccagcatcagcggcagcggcgactacatctactacgccgatagcgtgaagggcagattcaccatcagccgggacatcagcaagaacaccctgtacctccagatgaacagcctgagagccgaggacaccgccgtgtactactgtgccaaagaaggcaccggcgctaacagcagcctggccgattatagaggccagggcacactggtcaccgtgtctagtacgcgtgagcagaaactgatctcggaagaggatgggagcggcatccagaaccctgatcctgccgtgtaccagctgcgggatagcaagagcagcgacaagagcgtgtgtctgttcaccgacttcgacagccagaccaacgtgtcccagagcaaggactccgacgtgtacatcaccgataagtgcgtgctggacatgcggagcatggacttcaagagcaactccgccgtggcctggtccaacaagtccgatttcgcctgcgccaacgccttcaacaacagcattatccccgaggacacattcttcccaagcagcgacgtgccctgcgacgtgaagctggtggaaaagagcttcgagacagacaccaacctgaacttccagaacctgagcgtgatcggcttcagaatcctgctgctgaaagtggccggctttaacctgctgatgaccctgcggctgtggtccagccgcgccaagagaagcggatctggcgtgaagcagaccctgaatttcgacctgctgaagctggctggcgacgtggaatccaacccaggcccttctagaggccatatgaccgagtacaagcccacggtgcgcctcgccacccgcgacgacgtccccagggccgtacgcaccctcgccgccgcgttcgccgactaccccgccacgcgccacaccgtcgatccggaccgccacatcgagcgggtcaccgagctgcaagaactcttcctcacgcgcgtcgggctcgacatcggcaaggtgtgggtcgcggacgacggcgccgcggtggcggtctggaccacgccggagagcgtcgaagcgggggcggtgttcgccgagatcggcccgcgcatggccgagttgagcggttcccggctggccgcgcagcaacagatggaaggcctcctggcgccgcaccggcccaaggagcccgcgtggttcctggccaccgtcggcgtctcgcccgaccaccagggcaagggtctgggcagcgccgtcgtgctccccggagtggaggcggccgagcgcgccggggtgcccgccttcctggagacctccgcgccccgcaacctccccttctacgagcggctcggcttcaccgtcaccgccgacgtcgaggtgcccgaaggaccgcgcacctggtgcatgacccgcaagcccggtgcctga

SEQ ID NO: 22004 - DNA, 2712 bp, Artificial Sequence
  Synthetic Polynucleotide
atggccttaccagtgaccgccttgctcctgccgctggccttgctgctccacgccgccaggccgctcgaggggaaaccaattcccaaccctcttctgggactggattcaaccggcagcggcgaggacctgaagaacgtgttcccacctgaggtggccgtgttcgagcctagcaaggccgagatcgcccacacccagaaagccaccctcgtgtgcctggctaccggcttctaccccgaccatgtggaactgtcttggtgggtcaacggcaaagaggtgcacagcggcgtgtgtaccgacccccagccactgaaagaacagcccgccctgaacgacagccggtactgcctgagcagcagactgagagtgtccgccaccttctggcagaacccccggaaccacttcagatgccaggtgcagttctacggcctgagcgagaacgacgagtggacccaggacagagccaagcccgtgacccagatcgtgtctgccgaagcctggggcagagccgattgcggcatcaccagcgccagctaccaccagggcgtgctgagcgccaccatcctgtacgagatcctgctgggcaaggccaccctgtacgccgtgctggtgtctgccctggtgctgatggctatggtcaagcggaaggacagccggggaagggccaagcgatctggatctggagcaacaaacttctcactactcaaacaagcaggtgacgtggaggagaatcccgggcctactagcaccatggccttaccagtgaccgccttgctcctgccgctggccttgctgctccacgccgccaggccgcagctccagctgcaagagtctggacctggcctggtcaagcctagcgagacactgagcctgacctgtaccgtgtccggcgatagcatcagcagcggcgattactactggggctggatcagacagcctcctggcaaaggactggaatggatcggccacatctactacagcggcgtgacctactacaaccccagcctgaagtccagagtgaccatcagcgtggacaccagccggaaccagttctccctgaagctgtctagcgtgacagccgccgataccgccgtgtactactgcaccagagaggacagcagcaactggcggagtagaggccagggaacactggtcacagttagctctctcgagagcggcggaggcggatctttcgaacaggtgcagctggttgaatctggcggaggactggttcagcctggcggatctctgagactgtcttgtgccgccagcggcttcaccttcaccaatcacgccatgagctgggtccgacaggcccctggaaaaggactggaactggtgtctagcatcagcggcaacggcagaaccacctactacgccgatagcgtgaagggcagattcaccatcagccgggacatcagcaagaacaccctggacctccagatgaacagcctgagagccgaggataccgccgtgtactactgtgccaaggatggcggagagacactggtggatagcagaggccagggcacactggtcacagtgtcatctacgcgtgagcagaaactgatctcggaagaggatgggagcggcatccagaaccctgatcctgccgtgtaccagctgcgggatagcaagagcagcgacaagagcgtgtgtctgttcaccgacttcgacagccagaccaacgtgtcccagagcaaggactccgacgtgtacatcaccgataagtgcgtgctggacatgcggagcatggacttcaagagcaactccgccgtggcctggtccaacaagtccgatttcgcctgcgccaacgccttcaacaacagcattatccccgaggacacattcttcccaagcagcgacgtgccctgcgacgtgaagctggtggaaaagagcttcgagacagacaccaacctgaacttccagaacctgagcgtgatcggcttcagaatcctgctgctgaaagtggccggctttaacctgctgatgaccctgcggctgtggtccagccgcgccaagagaagcggatctggcgtgaagcagaccctgaatttcgacctgctgaagctggctggcgacgtggaatccaacccaggcccttctagaggccatatgaccgagtacaagcccacggtgcgcctcgccacccgcgacgacgtccccagggccgtacgcaccctcgccgccgcgttcgccgactaccccgccacgcgccacaccgtcgatccggaccgccacatcgagcgggtcaccgagctgcaagaactcttcctcacgcgcgtcgggctcgacatcggcaaggtgtgggtcgcggacgacggcgccgcggtggcggtctggaccacgccggagagcgtcgaagcgggggcggtgttcgccgagatcggcccgcgcatggccgagttgagcggttcccggctggccgcgcagcaacagatggaaggcctcctggcgccgcaccggcccaaggagcccgcgtggttcctggccaccgtcggcgtctcgcccgaccaccagggcaagggtctgggcagcgccgtcgtgctccccggagtggaggcggccgagcgcgccggggtgcccgccttcctggagacctccgcgccccgcaacctccccttctacgagcggctcggcttcaccgtcaccgccgacgtcgaggtgcccgaaggaccgcgcacctggtgcatgacccgcaagcccggtgcctga

SEQ ID NO: 22005 - DNA, 2331 bp, Artificial Sequence
  Synthetic Polynucleotide
atggccttaccagtgaccgccttgctcctgccgctggccttgctgctccacgccgccaggccgctcgaggggaaaccaattcccaaccctcttctgggactggattcaaccggcagcggcgaggacctgaagaacgtgttcccacctgaggtggccgtgttcgagcctagcaaggccgagatcgcccacacccagaaagccaccctcgtgtgcctggctaccggcttctaccccgaccatgtggaactgtcttggtgggtcaacggcaaagaggtgcacagcggcgtgtgtaccgacccccagccactgaaagaacagcccgccctgaacgacagccggtactgcctgagcagcagactgagagtgtccgccaccttctggcagaacccccggaaccacttcagatgccaggtgcagttctacggcctgagcgagaacgacgagtggacccaggacagagccaagcccgtgacccagatcgtgtctgccgaagcctggggcagagccgattgcggcatcaccagcgccagctaccaccagggcgtgctgagcgccaccatcctgtacgagatcctgctgggcaaggccaccctgtacgccgtgctggtgtctgccctggtgctgatggctatggtcaagcggaaggacagccggggaagggccaagcgatctggatctggagcaacaaacttctcactactcaaacaagcaggtgacgtggaggagaatcccgggcctactagcaccatggccttaccagtgaccgccttgctcctgccgctggccttgctgctccacgccgccaggccggaggtgcagctggttgaatctggcggaggactggttcagcctggcggatctctgagactgtcttgtgccgccagcggcttcaacatcaaggatacctgtatcggctgggttcgcagagcccctggcaaagaggaagaactggtcgccaaaatctgcaagtacagcggccacaccagatacgccgacagcgtgaagggcagattcaccatcagcgccgacaccagcaagaacaccgcctacctccagatgaacagcctgagagccgaggacaccgccgtgtactattgtgccgctgtgtccgtcagagatgggcactacaattactggggccagggcaccaccgtgaccgtttcttcaacgcgtgagcagaaactgatctcggaagaggatgggagcggcatccagaaccctgatcctgccgtgtaccagctgcgggatagcaagagcagcgacaagagcgtgtgtctgttcaccgacttcgacagccagaccaacgtgtcccagagcaaggactccgacgtgtacatcaccgataagtgcgtgctggacatgcggagcatggacttcaagagcaactccgccgtggcctggtccaacaagtccgatttcgcctgcgccaacgccttcaacaacagcattatccccgaggacacattcttcccaagcagcgacgtgccctgcgacgtgaagctggtggaaaagagcttcgagacagacaccaacctgaacttccagaacctgagcgtgatcggcttcagaatcctgctgctgaaagtggccggctttaacctgctgatgaccctgcggctgtggtccagccgcgccaagagaagcggatctggcgtgaagcagaccctgaatttcgacctgctgaagctggctggcgacgtggaatccaacccaggcccttctagaggccatatgaccgagtacaagcccacggtgcgcctcgccacccgcgacgacgtccccagggccgtacgcaccctcgccgccgcgttcgccgactaccccgccacgcgccacaccgtcgatccggaccgccacatcgagcgggtcaccgagctgcaagaactcttcctcacgcgcgtcgggctcgacatcggcaaggtgtgggtcgcggacgacggcgccgcggtggcggtctggaccacgccggagagcgtcgaagcgggggcggtgttcgccgagatcggcccgcgcatggccgagttgagcggttcccggctggccgcgcagcaacagatggaaggcctcctggcgccgcaccggcccaaggagcccgcgtggttcctggccaccgtcggcgtctcgcccgaccaccagggcaagggtctgggcagcgccgtcgtgctccccggagtggaggcggccgagcgcgccggggtgcccgccttcctggagacctccgcgccccgcaacctccccttctacgagcggctcggcttcaccgtcaccgccgacgtcgaggtgcccgaaggaccgcgcacctggtgcatgacccgcaagcccggtgcctga

SEQ ID NO: 22006 - DNA, 2334 bp, Artificial Sequence
  Synthetic Polynucleotide
atggccttaccagtgaccgccttgctcctgccgctggccttgctgctccacgccgccaggccgctcgaggggaaaccaattcccaaccctcttctgggactggattcaaccggcagcggcgaggacctgaagaacgtgttcccacctgaggtggccgtgttcgagcctagcaaggccgagatcgcccacacccagaaagccaccctcgtgtgcctggctaccggcttctaccccgaccatgtggaactgtcttggtgggtcaacggcaaagaggtgcacagcggcgtgtgtaccgacccccagccactgaaagaacagcccgccctgaacgacagccggtactgcctgagcagcagactgagagtgtccgccaccttctggcagaacccccggaaccacttcagatgccaggtgcagttctacggcctgagcgagaacgacgagtggacccaggacagagccaagcccgtgacccagatcgtgtctgccgaagcctggggcagagccgattgcggcatcaccagcgccagctaccaccagggcgtgctgagcgccaccatcctgtacgagatcctgctgggcaaggccaccctgtacgccgtgctggtgtctgccctggtgctgatggctatggtcaagcggaaggacagccggggaagggccaagcgatctggatctggagcaacaaacttctcactactcaaacaagcaggtgacgtggaggagaatcccgggcctactagcaccatggccttaccagtgaccgccttgctcctgccgctggccttgctgctccacgccgccaggccggaggtgcagctggttgaatctggcggaggactggttcagcctggcggatctctgagactgtcctgcacattttccggcggcaccttcagcagctacacaatgggctggttcagacaggcccctggcaaagaacgggaatttgtggccgaagtccgatggggcggagtgaccacatacagcaacagcctgaaggacagattcagcatcagcgaggacagcgtgaagaacgccgtgtacctccagatgaactccctgaagcctgaggacacagccgtgtactattgtgccgctgtgcggcagatgtacatgaccgtggtgcctgattattggggccagggcacactggtcacagtgtctagcacgcgtgagcagaaactgatctcggaagaggatgggagcggcatccagaaccctgatcctgccgtgtaccagctgcgggatagcaagagcagcgacaagagcgtgtgtctgttcaccgacttcgacagccagaccaacgtgtcccagagcaaggactccgacgtgtacatcaccgataagtgcgtgctggacatgcggagcatggacttcaagagcaactccgccgtggcctggtccaacaagtccgatttcgcctgcgccaacgccttcaacaacagcattatccccgaggacacattcttcccaagcagcgacgtgccctgcgacgtgaagctggtggaaaagagcttcgagacagacaccaacctgaacttccagaacctgagcgtgatcggcttcagaatcctgctgctgaaagtggccggctttaacctgctgatgaccctgcggctgtggtccagccgcgccaagagaagcggatctggcgtgaagcagaccctgaatttcgacctgctgaagctggctggcgacgtggaatccaacccaggcccttctagaggccatatgaccgagtacaagcccacggtgcgcctcgccacccgcgacgacgtccccagggccgtacgcaccctcgccgccgcgttcgccgactaccccgccacgcgccacaccgtcgatccggaccgccacatcgagcgggtcaccgagctgcaagaactcttcctcacgcgcgtcgggctcgacatcggcaaggtgtgggtcgcggacgacggcgccgcggtggcggtctggaccacgccggagagcgtcgaagcgggggcggtgttcgccgagatcggcccgcgcatggccgagttgagcggttcccggctggccgcgcagcaacagatggaaggcctcctggcgccgcaccggcccaaggagcccgcgtggttcctggccaccgtcggcgtctcgcccgaccaccagggcaagggtctgggcagcgccgtcgtgctccccggagtggaggcggccgagcgcgccggggtgcccgccttcctggagacctccgcgccccgcaacctccccttctacgagcggctcggcttcaccgtcaccgccgacgtcgaggtgcccgaaggaccgcgcacctggtgcatgacccgcaagcccggtgcctga

SEQ ID NO: 22007 - DNA, 2589 bp, Artificial Sequence
  Synthetic Polynucleotide
atggccttaccagtgaccgccttgctcctgccgctggccttgctgctccacgccgccaggccgcagctccagctgcaagagtctggacctggcctggtcaagcctagcgagacactgagcctgacctgtaccgtgtccggcgatagcatcagcagcggcgattactactggggctggatcagacagcctcctggcaaaggactggaatggatcggccacatctactacagcggcgtgacctactacaaccccagcctgaagtccagagtgaccatcagcgtggacaccagccggaaccagttctccctgaagctgtctagcgtgacagccgccgataccgccgtgtactactgcaccagagaggacagcagcaactggcggagtagaggccagggaacactggtcacagttagctctctcgaggacctgaagaacgtgttcccacctgaggtggccgtgttcgagcctagcgaggccgagatcagccacacccagaaagccaccctcgtgtgcctggctaccggcttctaccccgaccatgtggaactgtcttggtgggtcaacggcaaagaggtgcacagcggcgtgtgtaccgacccccagccactgaaagaacagcccgccctgaacgacagccggtactgcctgagcagcagactgagagtgtccgccaccttctggcagaacccccggaaccacttcagatgccaggtgcagttctacggcctgagcgagaacgacgagtggacccaggacagagccaagcccgtgacccagatcgtgtctgccgaagcctggggcagagccgattgcggctttaccagcgagagctaccagcagggcgtgctgagcgccaccatcctgtacgagatcctgctgggcaaggccaccctgtacgccgtgctggtgtctgccctggtgctgatggctatggtcaagcggaaggacagccggggaagggccaagcgatctggatctggagcaacaaacttctcactactcaaacaagcaggtgacgtggaggagaatcccgggcctactagtatggactggatttggcgcatccttttccttgtcggcgctgctaccggcgcgcattccttcgaagtgcaactggtggaaagcggaggcggacttgttcaaccaggcggaagcctgagactgagctgtgccgcttccggctttaatatcaaagacacatgcatcggatgggttcgccgcgctccagggaaagaagaggaactggttgccgacatctgtccctacaagggcagcacaagatatgccgactccgtgaaaggccggtttaccatctctgccgacacctctaagaatacggcctatctgcaaatgaactctctgcgggccgaagatacagccgtgtattactgcgccatcgtgtctgccagagatggctactataactattggggacagggaaccacagtcacagtgtcctctacgcgtatccagaaccctgatcctgccgtgtaccagctgcgggatagcaagagcagcgacaagagcgtgtgtctgttcaccgacttcgacagccagaccaacgtgtcccagagcaaggactccgacgtgtacatcaccgataagtgcgtgctggacatgcggagcatggacttcaagagcaactccgccgtggcctggtccaacaagtccgatttcgcctgcgccaacgccttcaacaacagcattatccccgaggacacattcttcccaagccccgagagcagctgcgacgtgaagctggtggaaaagagcttcgagacagacaccaacctgaacttccagaacctgagcgtgatcggcttcagaatcctgctgctgaaagtggccggctttaacctgctgatgaccctgcggctgtggtccagccgcgccaagagaagcggatctggcgtgaagcagaccctgaatttcgacctgctgaagctggctggcgacgtggaatccaacccaggcccttctagaggccatatgaccgagtacaagcccacggtgcgcctcgccacccgcgacgacgtccccagggccgtacgcaccctcgccgccgcgttcgccgactaccccgccacgcgccacaccgtcgatccggaccgccacatcgagcgggtcaccgagctgcaagaactcttcctcacgcgcgtcgggctcgacatcggcaaggtgtgggtcgcggacgacggcgccgcggtggcggtctggaccacgccggagagcgtcgaagcgggggcggtgttcgccgagatcggcccgcgcatggccgagttgagcggttcccggctggccgcgcagcaacagatggaaggcctcctggcgccgcaccggcccaaggagcccgcgtggttcctggccaccgtcggcgtctcgcccgaccaccagggcaagggtctgggcagcgccgtcgtgctccccggagtggaggcggccgagcgcgccggggtgcccgccttcctggagacctccgcgccccgcaacctccccttctacgagcggctcggcttcaccgtcaccgccgacgtcgaggtgcccgaaggaccgcgcacctggtgcatgacccgcaagcccggtgcctga

SEQ ID NO: 22008 - DNA, 2598 bp, Artificial Sequence
  Synthetic Polynucleotide
atggccttaccagtgaccgccttgctcctgccgctggccttgctgctccacgccgccaggccgcagctccagctgcaagagtctggacctggcctggtcaagcctagcgagacactgagcctgacctgtaccgtgtccggcgatagcatcagcagcggcgattactactggggctggatcagacagcctcctggcaaaggactggaatggatcggccacatctactacagcggcgtgacctactacaaccccagcctgaagtccagagtgaccatcagcgtggacaccagccggaaccagttctccctgaagctgtctagcgtgacagccgccgataccgccgtgtactactgcaccagagaggacagcagcaactggcggagtagaggccagggaacactggtcacagttagctctctcgaggacctgaagaacgtgttcccacctgaggtggccgtgttcgagcctagcgaggccgagatcagccacacccagaaagccaccctcgtgtgcctggctaccggcttctaccccgaccatgtggaactgtcttggtgggtcaacggcaaagaggtgcacagcggcgtgtgtaccgacccccagccactgaaagaacagcccgccctgaacgacagccggtactgcctgagcagcagactgagagtgtccgccaccttctggcagaacccccggaaccacttcagatgccaggtgcagttctacggcctgagcgagaacgacgagtggacccaggacagagccaagcccgtgacccagatcgtgtctgccgaagcctggggcagagccgattgcggctttaccagcgagagctaccagcagggcgtgctgagcgccaccatcctgtacgagatcctgctgggcaaggccaccctgtacgccgtgctggtgtctgccctggtgctgatggctatggtcaagcggaaggacagccggggaagggccaagcgatctggatctggagcaacaaacttctcactactcaaacaagcaggtgacgtggaggagaatcccgggcctactagtatggactggatttggcgcatccttttccttgtcggcgctgctaccggcgcgcattccttcgaagttcagctgcttgagtctggcggaggactggttcaacctggcggaagcctgagactgtcttgtgccgccagcggcttcatcttcagcagctacgccatgagctgggtccgacaggctcctggaaagggccaagaatgggtttccggcgttagcggcacaggcgtgaacacctactacgccgatagcgtgaagggcagattcaccatcagccgggacaacagcaagaacaccctgtacctccagatgaacagcctgagagccgaggacaccgccgtgtactattgtgcctctggcaaaggctgggacagcggctcttggtacgaggactatagaggccagggcaccctggtcacagtttcttcaacgcgtatccagaaccctgatcctgccgtgtaccagctgcgggatagcaagagcagcgacaagagcgtgtgtctgttcaccgacttcgacagccagaccaacgtgtcccagagcaaggactccgacgtgtacatcaccgataagtgcgtgctggacatgcggagcatggacttcaagagcaactccgccgtggcctggtccaacaagtccgatttcgcctgcgccaacgccttcaacaacagcattatccccgaggacacattcttcccaagccccgagagcagctgcgacgtgaagctggtggaaaagagcttcgagacagacaccaacctgaacttccagaacctgagcgtgatcggcttcagaatcctgctgctgaaagtggccggctttaacctgctgatgaccctgcggctgtggtccagccgcgccaagagaagcggatctggcgtgaagcagaccctgaatttcgacctgctgaagctggctggcgacgtggaatccaacccaggcccttctagaggccatatgaccgagtacaagcccacggtgcgcctcgccacccgcgacgacgtccccagggccgtacgcaccctcgccgccgcgttcgccgactaccccgccacgcgccacaccgtcgatccggaccgccacatcgagcgggtcaccgagctgcaagaactcttcctcacgcgcgtcgggctcgacatcggcaaggtgtgggtcgcggacgacggcgccgcggtggcggtctggaccacgccggagagcgtcgaagcgggggcggtgttcgccgagatcggcccgcgcatggccgagttgagcggttcccggctggccgcgcagcaacagatggaaggcctcctggcgccgcaccggcccaaggagcccgcgtggttcctggccaccgtcggcgtctcgcccgaccaccagggcaagggtctgggcagcgccgtcgtgctccccggagtggaggcggccgagcgcgccggggtgcccgccttcctggagacctccgcgccccgcaacctccccttctacgagcggctcggcttcaccgtcaccgccgacgtcgaggtgcccgaaggaccgcgcacctggtgcatgacccgcaagcccggtgcctga

SEQ ID NO: 22009 - DNA, 2736 bp, Artificial Sequence; identical to SEQ ID NO: 21999
  Synthetic Polynucleotide

SEQ ID NO: 22010 - DNA, 2751 bp, Artificial Sequence; identical to SEQ ID NO: 22000
  Synthetic Polynucleotide

SEQ ID NO: 22011 - DNA, 2589 bp, Artificial Sequence; identical to SEQ ID NO: 21993
  Synthetic Polynucleotide

SEQ ID NO: 22012 - DNA, 2601 bp, Artificial Sequence
  Synthetic Polynucleotide
atggactggatttggcgcatccttttccttgtcggcgctgctaccggcgcccattcccagctccagctgcaagagtctggacctggcctggtcaagcctagcgagacactgagcctgacctgtacagttagcggcggctctgtgtccagcagcagctattactggggctggatcagacagcctcctggcaagagactggaactgatcggcagcatctactacggcggctccacctacttcaaccccagcctgaaaaccagagtgaccatcagcgtggacaccagcaagaaccagttcagcctgaagctgagcagcgttacagccgccgatacagccgtgtactattgtgccggcggagacacatacggccctgttggacaatggcccagcgactatagaggccagggcacactggtcacagtgtctagcctcgaggacctgaagaacgtgttcccacctgaggtggccgtgttcgagcctagcgaggccgagatcagccacacccagaaagccaccctcgtgtgcctggctaccggcttctaccccgaccatgtggaactgtcttggtgggtcaacggcaaagaggtgcacagcggcgtgtgtaccgacccccagccactgaaagaacagcccgccctgaacgacagccggtactgcctgagcagcagactgagagtgtccgccaccttctggcagaacccccggaaccacttcagatgccaggtgcagttctacggcctgagcgagaacgacgagtggacccaggacagagccaagcccgtgacccagatcgtgtctgccgaagcctggggcagagccgattgcggctttaccagcgagagctaccagcagggcgtgctgagcgccaccatcctgtacgagatcctgctgggcaaggccaccctgtacgccgtgctggtgtctgccctggtgctgatggctatggtcaagcggaaggacagccggggaagggccaagcgatctggatctggagcaacaaacttctcactactcaaacaagcaggtgacgtggaggagaatcccgggcctactagtatggactggatttggcgcatccttttccttgtcggcgctgctaccggcgcgcattccttcgaagtgcagctgcttgaaagtggcggcggactgattcagcctggcggatctctgagactgagctgtgccgccagcggcttcaccttttctagccacgccatgacctgggtccgacaggcacctggaaaagggcttgaatgggtgtccgccatcagcggctctggcgattacacacactacgccgacagcgtgaagggcagattcaccatcagcagagacaacagcaagaacaccgtgtacctccagatgaacagcctgagagccgaggacagcgccgtgtattattgcgccaaggatgaggatggcggcagcctgcttggacacagaggacaaggcaccctggtcaccgtttcttccacgcgtatccagaaccctgatcctgccgtgtaccagctgcgggatagcaagagcagcgacaagagcgtgtgtctgttcaccgacttcgacagccagaccaacgtgtcccagagcaaggactccgacgtgtacatcaccgataagtgcgtgctggacatgcggagcatggacttcaagagcaactccgccgtggcctggtccaacaagtccgatttcgcctgcgccaacgccttcaacaacagcattatccccgaggacacattcttcccaagccccgagagcagctgcgacgtgaagctggtggaaaagagcttcgagacagacaccaacctgaacttccagaacctgagcgtgatcggcttcagaatcctgctgctgaaagtggccggctttaacctgctgatgaccctgcggctgtggtccagccgcgccaagagaagcggatctggcgtgaagcagaccctgaatttcgacctgctgaagctggctggcgacgtggaatccaacccaggcccttctagaggccatatgaccgagtacaagcccacggtgcgcctcgccacccgcgacgacgtccccagggccgtacgcaccctcgccgccgcgttcgccgactaccccgccacgcgccacaccgtcgatccggaccgccacatcgagcgggtcaccgagctgcaagaactcttcctcacgcgcgtcgggctcgacatcggcaaggtgtgggtcgcggacgacggcgccgcggtggcggtctggaccacgccggagagcgtcgaagcgggggcggtgttcgccgagatcggcccgcgcatggccgagttgagcggttcccggctggccgcgcagcaacagatggaaggcctcctggcgccgcaccggcccaaggagcccgcgtggttcctggccaccgtcggcgtctcgcccgaccaccagggcaagggtctgggcagcgccgtcgtgctccccggagtggaggcggccgagcgcgccggggtgcccgccttcctggagacctccgcgccccgcaacctccccttctacgagcggctcggcttcaccgtcaccgccgacgtcgaggtgcccgaaggaccgcgcacctggtgcatgacccgcaagcccggtgcctga

SEQ ID NO: 22013 - DNA, 2607 bp, Artificial Sequence
  Synthetic Polynucleotide
atggccttaccagtgaccgccttgctcctgccgctggccttgctgctccacgccgccaggccgcagctccagctgcaagagtctggacctggcctggtcaagcctagcgagacactgagcctgacctgtaccgtgtccggcgatagcatcagcagcggcgattactactggggctggatcagacagcctcctggcaaaggactggaatggatcggccacatctactacagcggcgtgacctactacaaccccagcctgaagtccagagtgaccatcagcgtggacaccagccggaaccagttctccctgaagctgtctagcgtgacagccgccgataccgccgtgtactactgcaccagagaggacagcagcaactggcggagtagaggccagggaacactggtcacagttagctctctcgaggacctgaagaacgtgttcccacctgaggtggccgtgttcgagcctagcgaggccgagatcagccacacccagaaagccaccctcgtgtgcctggctaccggcttctaccccgaccatgtggaactgtcttggtgggtcaacggcaaagaggtgcacagcggcgtgtgtaccgacccccagccactgaaagaacagcccgccctgaacgacagccggtactgcctgagcagcagactgagagtgtccgccaccttctggcagaacccccggaaccacttcagatgccaggtgcagttctacggcctgagcgagaacgacgagtggacccaggacagagccaagcccgtgacccagatcgtgtctgccgaagcctggggcagagccgattgcggctttaccagcgagagctaccagcagggcgtgctgagcgccaccatcctgtacgagatcctgctgggcaaggccaccctgtacgccgtgctggtgtctgccctggtgctgatggctatggtcaagcggaaggacagccggggaagggccaagcgatctggatctggagcaacaaacttctcactactcaaacaagcaggtgacgtggaggagaatcccgggcctactagtatggactggatttggcgcatccttttccttgtcggcgctgctaccggcgcgcattccttcgaacagctgcaactgcaagagtctggccccggactggtcaagccttctgaaacactggccctgacctgcaatgtgtccggcggctctatcagcagcagctcctattactggggctggatcagacagcctccaggcaagagactggaatggatcggcagcatctactacagcggcagcacatacttcaaccccagcctgaagtccagagtgaccatcagcgtggacacctccaagaaccagttctccctgaagctgagcagcgtgacagccgccgatacagccgtgtattactgtgctggcggcgactactatggccccgttggacaatggcccagcgattacagaggacagggaacccttgtgaccgtgtcctctacgcgtatccagaaccctgatcctgccgtgtaccagctgcgggatagcaagagcagcgacaagagcgtgtgtctgttcaccgacttcgacagccagaccaacgtgtcccagagcaaggactccgacgtgtacatcaccgataagtgcgtgctggacatgcggagcatggacttcaagagcaactccgccgtggcctggtccaacaagtccgatttcgcctgcgccaacgccttcaacaacagcattatccccgaggacacattcttcccaagccccgagagcagctgcgacgtgaagctggtggaaaagagcttcgagacagacaccaacctgaacttccagaacctgagcgtgatcggcttcagaatcctgctgctgaaagtggccggctttaacctgctgatgaccctgcggctgtggtccagccgcgccaagagaagcggatctggcgtgaagcagaccctgaatttcgacctgctgaagctggctggcgacgtggaatccaacccaggcccttctagaggccatatgaccgagtacaagcccacggtgcgcctcgccacccgcgacgacgtccccagggccgtacgcaccctcgccgccgcgttcgccgactaccccgccacgcgccacaccgtcgatccggaccgccacatcgagcgggtcaccgagctgcaagaactcttcctcacgcgcgtcgggctcgacatcggcaaggtgtgggtcgcggacgacggcgccgcggtggcggtctggaccacgccggagagcgtcgaagcgggggcggtgttcgccgagatcggcccgcgcatggccgagttgagcggttcccggctggccgcgcagcaacagatggaaggcctcctggcgccgcaccggcccaaggagcccgcgtggttcctggccaccgtcggcgtctcgcccgaccaccagggcaagggtctgggcagcgccgtcgtgctccccggagtggaggcggccgagcgcgccggggtgcccgccttcctggagacctccgcgccccgcaacctccccttctacgagcggctcggcttcaccgtcaccgccgacgtcgaggtgcccgaaggaccgcgcacctggtgcatgacccgcaagcccggtgcctga

SEQ ID NO: 22014 - DNA, 2598 bp, Artificial Sequence
  Synthetic Polynucleotide
atggccttaccagtgaccgccttgctcctgccgctggccttgctgctccacgccgccaggccgcaggtgcagctggttgaatctggcggaggactggttcagcctggcggatctctgagactgtcttgtgccgccagcggcttcaccttcaccaatcacgccatgagctgggtccgacaggcccctggaaaaggactggaactggtgtctagcatcagcggcaacggcagaaccacctactacgccgatagcgtgaagggcagattcaccatcagccgggacatcagcaagaacaccctggacctccagatgaacagcctgagagccgaggataccgccgtgtactactgtgccaaggatggcggagagacactggtggatagcagaggccagggcacactggtcacagtgtcatctctcgaggacctgaagaacgtgttcccacctgaggtggccgtgttcgagcctagcgaggccgagatcagccacacccagaaagccaccctcgtgtgcctggctaccggcttctaccccgaccatgtggaactgtcttggtgggtcaacggcaaagaggtgcacagcggcgtgtgtaccgacccccagccactgaaagaacagcccgccctgaacgacagccggtactgcctgagcagcagactgagagtgtccgccaccttctggcagaacccccggaaccacttcagatgccaggtgcagttctacggcctgagcgagaacgacgagtggacccaggacagagccaagcccgtgacccagatcgtgtctgccgaagcctggggcagagccgattgcggctttaccagcgagagctaccagcagggcgtgctgagcgccaccatcctgtacgagatcctgctgggcaaggccaccctgtacgccgtgctggtgtctgccctggtgctgatggctatggtcaagcggaaggacagccggggaagggccaagcgatctggatctggagcaacaaacttctcactactcaaacaagcaggtgacgtggaggagaatcccgggcctactagtatggactggatttggcgcatccttttccttgtcggcgctgctaccggcgcgcattccttcgaagttcagctgcttgaaagcggtggcggcctggttcaacctggcggatctctgagactgagctgtgccgccagcggcttcatcttctccatctacgccatgtcctgggtccgacaggcccctggaaaaggactggaatgggtgtccggcatctctggcagcggcgtgaacacctactacgccgattctgtgaagggccgcttcatcatcagccgggacaacagcagaaacaccgtgtacctccagatgaacagcctgagagccgatgacaccgccgtgtaccactgcgccaatggcaaaggctgggacggcaacacttggtacgaggattacagaggacagggaaccctcgtgaccgtgtctagtacgcgtatccagaaccctgatcctgccgtgtaccagctgcgggatagcaagagcagcgacaagagcgtgtgtctgttcaccgacttcgacagccagaccaacgtgtcccagagcaaggactccgacgtgtacatcaccgataagtgcgtgctggacatgcggagcatggacttcaagagcaactccgccgtggcctggtccaacaagtccgatttcgcctgcgccaacgccttcaacaacagcattatccccgaggacacattcttcccaagccccgagagcagctgcgacgtgaagctggtggaaaagagcttcgagacagacaccaacctgaacttccagaacctgagcgtgatcggcttcagaatcctgctgctgaaagtggccggctttaacctgctgatgaccctgcggctgtggtccagccgcgccaagagaagcggatctggcgtgaagcagaccctgaatttcgacctgctgaagctggctggcgacgtggaatccaacccaggcccttctagaggccatatgaccgagtacaagcccacggtgcgcctcgccacccgcgacgacgtccccagggccgtacgcaccctcgccgccgcgttcgccgactaccccgccacgcgccacaccgtcgatccggaccgccacatcgagcgggtcaccgagctgcaagaactcttcctcacgcgcgtcgggctcgacatcggcaaggtgtgggtcgcggacgacggcgccgcggtggcggtctggaccacgccggagagcgtcgaagcgggggcggtgttcgccgagatcggcccgcgcatggccgagttgagcggttcccggctggccgcgcagcaacagatggaaggcctcctggcgccgcaccggcccaaggagcccgcgtggttcctggccaccgtcggcgtctcgcccgaccaccagggcaagggtctgggcagcgccgtcgtgctccccggagtggaggcggccgagcgcgccggggtgcccgccttcctggagacctccgcgccccgcaacctccccttctacgagcggctcggcttcaccgtcaccgccgacgtcgaggtgcccgaaggaccgcgcacctggtgcatgacccgcaagcccggtgcctga

SEQ ID NO: 22015 - DNA, 2601 bp, Artificial Sequence; identical to SEQ ID NO: 21998
  Synthetic Polynucleotide

SEQ ID NO: 22016 - DNA, 2601 bp, Artificial Sequence; identical to SEQ ID NO: 21998
  Synthetic Polynucleotide

SEQ ID NO: 22017 - DNA, 2991 bp, Artificial Sequence
  Synthetic Polynucleotide
atggccttaccagtgaccgccttgctcctgccgctggccttgctgctccacgccgccaggccgcagctccagctgcaagagtctggacctggcctggtcaagcctagcgagacactgagcctgacctgtaccgtgtccggcgatagcatcagcagcggcgattactactggggctggatcagacagcctcctggcaaaggactggaatggatcggccacatctactacagcggcgtgacctactacaaccccagcctgaagtccagagtgaccatcagcgtggacaccagccggaaccagttctccctgaagctgtctagcgtgacagccgccgataccgccgtgtactactgcaccagagaggacagcagcaactggcggagtagaggccagggaacactggtcacagttagctctctcgaggacctgaagaacgtgttcccacctgaggtggccgtgttcgagcctagcgaggccgagatcagccacacccagaaagccaccctcgtgtgcctggctaccggcttctaccccgaccatgtggaactgtcttggtgggtcaacggcaaagaggtgcacagcggcgtgtgtaccgacccccagccactgaaagaacagcccgccctgaacgacagccggtactgcctgagcagcagactgagagtgtccgccaccttctggcagaacccccggaaccacttcagatgccaggtgcagttctacggcctgagcgagaacgacgagtggacccaggacagagccaagcccgtgacccagatcgtgtctgccgaagcctggggcagagccgattgcggctttaccagcgagagctaccagcagggcgtgctgagcgccaccatcctgtacgagatcctgctgggcaaggccaccctgtacgccgtgctggtgtctgccctggtgctgatggctatggtcaagcggaaggacagccggggaagggccaagcgatctggatctggagcaacaaacttctcactactcaaacaagcaggtgacgtggaggagaatcccgggcctactagtaccatggactggatttggcgcatccttttccttgtcggcgctgctaccggcgcccattccgaggttcagctgcttgagtctggcggaggactggttcaacctggcggaagcctgagactgtcttgtgccgcttccggcttcagcttcagcagctatgccctgagctgggtccgacaggctcctggcaaaggactggaatgggtgtccagcatcggcgagaatgacggcaccaccgattatgccgatgccgtgaagggcagattcaccatctctcgggacaacagcaagaacaccctgtacctccagatgaacagcctcagagtggaagataccgccgtgtactactgcgtgaaggacggcgttcactggggccagggaacactggttacagtgtctagcggatccggcggaggcggaagtggaggcggaggatctttcgaagttcagttggtagagtctggaggcggagtggtacaaccggggcggtctcttagacttagttgcgcagcaagcggtttctctttctctggctatgggatgcactgggtgagacaggcccctgggaaaggactggagtgggtggcctacatttcatacgacgggagtaataaatactatgcagactccgttaagggcaggttcacgatctctcgggacaattccaagaatacattgtatcttcagatgaatagtctccgagctgaagacacggcggtttactactgcgctaaagacccggcctggggacttcgacttggagagagttctagctacgattttgacatttggggacaagggacaatggtcactgtctcaagtacgcgtatccagaaccctgatcctgccgtgtaccagctgcgggatagcaagagcagcgacaagagcgtgtgtctgttcaccgacttcgacagccagaccaacgtgtcccagagcaaggactccgacgtgtacatcaccgataagtgcgtgctggacatgcggagcatggacttcaagagcaactccgccgtggcctggtccaacaagtccgatttcgcctgcgccaacgccttcaacaacagcattatccccgaggacacattcttcccaagccccgagagcagctgcgacgtgaagctggtggaaaagagcttcgagacagacaccaacctgaacttccagaacctgagcgtgatcggcttcagaatcctgctgctgaaagtggccggctttaacctgctgatgaccctgcggctgtggtccagccgcgccaagagaagcggatctggcgtgaagcagaccctgaatttcgacctgctgaagctggctggcgacgtggaatccaacccaggcccttctagaggccatatgaccgagtacaagcccacggtgcgcctcgccacccgcgacgacgtccccagggccgtacgcaccctcgccgccgcgttcgccgactaccccgccacgcgccacaccgtcgatccggaccgccacatcgagcgggtcaccgagctgcaagaactcttcctcacgcgcgtcgggctcgacatcggcaaggtgtgggtcgcggacgacggcgccgcggtggcggtctggaccacgccggagagcgtcgaagcgggggcggtgttcgccgagatcggcccgcgcatggccgagttgagcggttcccggctggccgcgcagcaacagatggaaggcctcctggcgccgcaccggcccaaggagcccgcgtggttcctggccaccgtcggcgtctcgcccgaccaccagggcaagggtctgggcagcgccgtcgtgctccccggagtggaggcggccgagcgcgccggggtgcccgccttcctggagacctccgcgccccgcaacctccccttctacgagcggctcggcttcaccgtcaccgccgacgtcgaggtgcccgaaggaccgcgcacctggtgcatgacccgcaagcccggtgcctga

SEQ ID NO: 22018 - DNA, 3084 bp, Artificial Sequence
  Synthetic Polynucleotide
atggccttaccagtgaccgccttgctcctgccgctggccttgctgctccacgccgccaggccggaggtgcagctggttgaatctggcggaggactggttcagcctggcggatctctgagactgtcttgtgccgccagcggcttcaacatcaaggatacctgtatcggctgggttcgcagagcccctggcaaagaggaagaactggtcgccaaaatctgcaagtacagcggccacaccagatacgccgacagcgtgaagggcagattcaccatcagcgccgacaccagcaagaacaccgcctacctccagatgaacagcctgagagccgaggacaccgccgtgtactattgtgccgctgtgtccgtcagagatgggcactacaattactggggccagggcaccaccgtgaccgtttcttcactcgaggggaaaccaattcccaaccctcttctgggactggattcaaccggcagcggcgaggacctgaagaacgtgttcccacctgaggtggccgtgttcgagcctagcaaggccgagatcgcccacacccagaaagccaccctcgtgtgcctggctaccggcttctaccccgaccatgtggaactgtcttggtgggtcaacggcaaagaggtgcacagcggcgtgtgtaccgacccccagccactgaaagaacagcccgccctgaacgacagccggtactgcctgagcagcagactgagagtgtccgccaccttctggcagaacccccggaaccacttcagatgccaggtgcagttctacggcctgagcgagaacgacgagtggacccaggacagagccaagcccgtgacccagatcgtgtctgccgaagcctggggcagagccgattgcggcatcaccagcgccagctaccaccagggcgtgctgagcgccaccatcctgtacgagatcctgctgggcaaggccaccctgtacgccgtgctggtgtctgccctggtgctgatggctatggtcaagcggaaggacagccggggaagggccaagcgatctggatctggagcaacaaacttctcactactcaaacaagcaggtgacgtggaggagaatcccgggcctactagtaccatggactggatttggcgcatccttttccttgtcggcgctgctaccggcgcccattccgaggttcagctgcttgagtctggcggaggactggttcaacctggcggaagcctgagactgtcttgtgccgcttccggcttcagcttcagcagctatgccctgagctgggtccgacaggctcctggcaaaggactggaatgggtgtccagcatcggcgagaatgacggcaccaccgattatgccgatgccgtgaagggcagattcaccatctctcgggacaacagcaagaacaccctgtacctccagatgaacagcctcagagtggaagataccgccgtgtactactgcgtgaaggacggcgttcactggggccagggaacactggttacagtgtctagcggatccggcggaggcggaagtggaggcggaggatctttcgaagttcagttggtagagtctggaggcggagtggtacaaccggggcggtctcttagacttagttgcgcagcaagcggtttctctttctctggctatgggatgcactgggtgagacaggcccctgggaaaggactggagtgggtggcctacatttcatacgacgggagtaataaatactatgcagactccgttaagggcaggttcacgatctctcgggacaattccaagaatacattgtatcttcagatgaatagtctccgagctgaagacacggcggtttactactgcgctaaagacccggcctggggacttcgacttggagagagttctagctacgattttgacatttggggacaagggacaatggtcactgtctcaagtacgcgtgagcagaaactgatctcggaagaggatgggagcggcatccagaaccctgatcctgccgtgtaccagctgcgggatagcaagagcagcgacaagagcgtgtgtctgttcaccgacttcgacagccagaccaacgtgtcccagagcaaggactccgacgtgtacatcaccgataagtgcgtgctggacatgcggagcatggacttcaagagcaactccgccgtggcctggtccaacaagtccgatttcgcctgcgccaacgccttcaacaacagcattatccccgaggacacattcttcccaagcagcgacgtgccctgcgacgtgaagctggtggaaaagagcttcgagacagacaccaacctgaacttccagaacctgagcgtgatcggcttcagaatcctgctgctgaaagtggccggctttaacctgctgatgaccctgcggctgtggtccagccgcgccaagagaagcggatctggcgtgaagcagaccctgaatttcgacctgctgaagctggctggcgacgtggaatccaacccaggcccttctagaggccatatgaccgagtacaagcccacggtgcgcctcgccacccgcgacgacgtccccagggccgtacgcaccctcgccgccgcgttcgccgactaccccgccacgcgccacaccgtcgatccggaccgccacatcgagcgggtcaccgagctgcaagaactcttcctcacgcgcgtcgggctcgacatcggcaaggtgtgggtcgcggacgacggcgccgcggtggcggtctggaccacgccggagagcgtcgaagcgggggcggtgttcgccgagatcggcccgcgcatggccgagttgagcggttcccggctggccgcgcagcaacagatggaaggcctcctggcgccgcaccggcccaaggagcccgcgtggttcctggccaccgtcggcgtctcgcccgaccaccagggcaagggtctgggcagcgccgtcgtgctccccggagtggaggcggccgagcgcgccggggtgcccgccttcctggagacctccgcgccccgcaacctccccttctacgagcggctcggcttcaccgtcaccgccgacgtcgaggtgcccgaaggaccgcgcacctggtgcatgacccgcaagcccggtgcctga

SEQ ID NO: 22019 - DNA, 2712 bp, Artificial Sequence
  Synthetic Polynucleotide
atggccttaccagtgaccgccttgctcctgccgctggccttgctgctccacgccgccaggccgctcgaggggaaaccaattcccaaccctcttctgggactggattcaaccggcagcggcgaggacctgaagaacgtgttcccacctgaggtggccgtgttcgagcctagcaaggccgagatcgcccacacccagaaagccaccctcgtgtgcctggctaccggcttctaccccgaccatgtggaactgtcttggtgggtcaacggcaaagaggtgcacagcggcgtgtgtaccgacccccagccactgaaagaacagcccgccctgaacgacagccggtactgcctgagcagcagactgagagtgtccgccaccttctggcagaacccccggaaccacttcagatgccaggtgcagttctacggcctgagcgagaacgacgagtggacccaggacagagccaagcccgtgacccagatcgtgtctgccgaagcctggggcagagccgattgcggcatcaccagcgccagctaccaccagggcgtgctgagcgccaccatcctgtacgagatcctgctgggcaaggccaccctgtacgccgtgctggtgtctgccctggtgctgatggctatggtcaagcggaaggacagccggggaagggccaagcgatctggatctggagcaacaaacttctcactactcaaacaagcaggtgacgtggaggagaatcccgggcctactagcaccatggccttaccagtgaccgccttgctcctgccgctggccttgctgctccacgccgccaggccgcagctccagctgcaagagtctggacctggcctggtcaagcctagcgagacactgagcctgacctgtaccgtgtccggcgatagcatcagcagcggcgattactactggggctggatcagacagcctcctggcaaaggactggaatggatcggccacatctactacagcggcgtgacctactacaaccccagcctgaagtccagagtgaccatcagcgtggacaccagccggaaccagttctccctgaagctgtctagcgtgacagccgccgataccgccgtgtactactgcaccagagaggacagcagcaactggcggagtagaggccagggaacactggtcacagttagctctctcgagagcggcggaggcggatctttcgaagtgcagctgcttgaaagtggcggcggactgattcagcctggcggatctctgagactgagctgtgccgccagcggcttcaccttttctagccacgccatgacctgggtccgacaggcacctggaaaagggcttgaatgggtgtccgccatcagcggctctggcgattacacacactacgccgacagcgtgaagggcagattcaccatcagcagagacaacagcaagaacaccgtgtacctccagatgaacagcctgagagccgaggacagcgccgtgtattattgcgccaaggatgaggatggcggcagcctgcttggacacagaggacaaggcaccctggtcaccgtttcttccacgcgtgagcagaaactgatctcggaagaggatgggagcggcatccagaaccctgatcctgccgtgtaccagctgcgggatagcaagagcagcgacaagagcgtgtgtctgttcaccgacttcgacagccagaccaacgtgtcccagagcaaggactccgacgtgtacatcaccgataagtgcgtgctggacatgcggagcatggacttcaagagcaactccgccgtggcctggtccaacaagtccgatttcgcctgcgccaacgccttcaacaacagcattatccccgaggacacattcttcccaagcagcgacgtgccctgcgacgtgaagctggtggaaaagagcttcgagacagacaccaacctgaacttccagaacctgagcgtgatcggcttcagaatcctgctgctgaaagtggccggctttaacctgctgatgaccctgcggctgtggtccagccgcgccaagagaagcggatctggcgtgaagcagaccctgaatttcgacctgctgaagctggctggcgacgtggaatccaacccaggcccttctagaggccatatgaccgagtacaagcccacggtgcgcctcgccacccgcgacgacgtccccagggccgtacgcaccctcgccgccgcgttcgccgactaccccgccacgcgccacaccgtcgatccggaccgccacatcgagcgggtcaccgagctgcaagaactcttcctcacgcgcgtcgggctcgacatcggcaaggtgtgggtcgcggacgacggcgccgcggtggcggtctggaccacgccggagagcgtcgaagcgggggcggtgttcgccgagatcggcccgcgcatggccgagttgagcggttcccggctggccgcgcagcaacagatggaaggcctcctggcgccgcaccggcccaaggagcccgcgtggttcctggccaccgtcggcgtctcgcccgaccaccagggcaagggtctgggcagcgccgtcgtgctccccggagtggaggcggccgagcgcgccggggtgcccgccttcctggagacctccgcgccccgcaacctccccttctacgagcggctcggcttcaccgtcaccgccgacgtcgaggtgcccgaaggaccgcgcacctggtgcatgacccgcaagcccggtgcctga

SEQ ID NO: 22020 - DNA, 1929 bp, Artificial Sequence
  Synthetic Polynucleotide
atggccttaccagtgaccgccttgctcctgccgctggccttgctgctccacgccgccaggccgcagctccagctgcaagagtctggacctggcctggtcaagcctagcgagacactgagcctgacctgtaccgtgtccggcgatagcatcagcagcggcgattactactggggctggatcagacagcctcctggcaaaggactggaatggatcggccacatctactacagcggcgtgacctactacaaccccagcctgaagtccagagtgaccatcagcgtggacaccagccggaaccagttctccctgaagctgtctagcgtgacagccgccgataccgccgtgtactactgcaccagagaggacagcagcaactggcggagtagaggccagggaacactggtcacagttagctctctcgacagcggcggaggcggatctttcgaacagctccagttgcaagagagcggccctggcttggtaaaaccttccgagacccttagcctcacatgcacggttagtgggggcagcatttcctcaggtgattactattggggatggattcggcaacccccgggtaaaggattggagtggattggtcatatttattatagtggagcgacgtactacaacccaagtctcaaatccagggttacaatatccgtcgatacgagcaggaaccaattcagcttgaaactttctagtgtcaccgcagcagacacagccgtctattactgtacgcgggatgactccagtaattggcggtcccgagggcaagggacactggtcacggtctcctcaacgcgtatccagaaccctgatcctgccgtgtaccagctgcgggatagcaagagcagcgacaagagcgtgtgtctgttcaccgacttcgacagccagaccaacgtgtcccagagcaaggactccgacgtgtacatcaccgataagtgcgtgctggacatgcggagcatggacttcaagagcaactccgccgtggcctggtccaacaagtccgatttcgcctgcgccaacgccttcaacaacagcattatccccgaggacacattcttcccaagccccgagagcagctgcgacgtgaagctggtggaaaagagcttcgagacagacaccaacctgaacttccagaacctgagcgtgatcggcttcagaatcctgctgctgaaagtggccggctttaacctgctgatgaccctgcggctgtggtccagccgcgccaagagaagcggatctggcgtgaagcagaccctgaatttcgacctgctgaagctggctggcgacgtggaatccaacccaggcccttctagaggccatatgaccgagtacaagcccacggtgcgcctcgccacccgcgacgacgtccccagggccgtacgcaccctcgccgccgcgttcgccgactaccccgccacgcgccacaccgtcgatccggaccgccacatcgagcgggtcaccgagctgcaagaactcttcctcacgcgcgtcgggctcgacatcggcaaggtgtgggtcgcggacgacggcgccgcggtggcggtctggaccacgccggagagcgtcgaagcgggggcggtgttcgccgagatcggcccgcgcatggccgagttgagcggttcccggctggccgcgcagcaacagatggaaggcctcctggcgccgcaccggcccaaggagcccgcgtggttcctggccaccgtcggcgtctcgcccgaccaccagggcaagggtctgggcagcgccgtcgtgctccccggagtggaggcggccgagcgcgccggggtgcccgccttcctggagacctccgcgccccgcaacctccccttctacgagcggctcggcttcaccgtcaccgccgacgtcgaggtgcccgaaggaccgcgcacctggtgcatgacccgcaagcccggtgcctga

SEQ ID NO: 22021 - DNA, 1938 bp, Artificial Sequence
  Synthetic Polynucleotide
atggccttaccagtgaccgccttgctcctgccgctggccttgctgctccacgccgccaggccgcagctccagctgcaagagtctggacctggcctggtcaagcctagcgagacactgagcctgacctgtaccgtgtccggcgatagcatcagcagcggcgattactactggggctggatcagacagcctcctggcaaaggactggaatggatcggccacatctactacagcggcgtgacctactacaaccccagcctgaagtccagagtgaccatcagcgtggacaccagccggaaccagttctccctgaagctgtctagcgtgacagccgccgataccgccgtgtactactgcaccagagaggacagcagcaactggcggagtagaggccagggaacactggtcacagttagctctctcgagagcggcggaggcggatctttcgaagaggttcagctgcttgagtctggcggaggactggttcaacctggcggaagcctgagactgtcttgtgccgccagcggcttcacctttagcagctacgccatgagctgggtccgacaggctcctggcaaaggactggaatgggtgtccagcatcagcggcagcggcgactacatctactacgccgatagcgtgaagggcagattcaccatcagccgggacatcagcaagaacaccctgtacctccagatgaacagcctgagagccgaggacaccgccgtgtactactgtgccaaagaaggcaccggcgctaacagcagcctggccgattatagaggccagggcacactggtcaccgtgtctagtacgcgtatccagaaccctgatcctgccgtgtaccagctgcgggatagcaagagcagcgacaagagcgtgtgtctgttcaccgacttcgacagccagaccaacgtgtcccagagcaaggactccgacgtgtacatcaccgataagtgcgtgctggacatgcggagcatggacttcaagagcaactccgccgtggcctggtccaacaagtccgatttcgcctgcgccaacgccttcaacaacagcattatccccgaggacacattcttcccaagccccgagagcagctgcgacgtgaagctggtggaaaagagcttcgagacagacaccaacctgaacttccagaacctgagcgtgatcggcttcagaatcctgctgctgaaagtggccggctttaacctgctgatgaccctgcggctgtggtccagccgcgccaagagaagcggatctggcgtgaagcagaccctgaatttcgacctgctgaagctggctggcgacgtggaatccaacccaggcccttctagaggccatatgaccgagtacaagcccacggtgcgcctcgccacccgcgacgacgtccccagggccgtacgcaccctcgccgccgcgttcgccgactaccccgccacgcgccacaccgtcgatccggaccgccacatcgagcgggtcaccgagctgcaagaactcttcctcacgcgcgtcgggctcgacatcggcaaggtgtgggtcgcggacgacggcgccgcggtggcggtctggaccacgccggagagcgtcgaagcgggggcggtgttcgccgagatcggcccgcgcatggccgagttgagcggttcccggctggccgcgcagcaacagatggaaggcctcctggcgccgcaccggcccaaggagcccgcgtggttcctggccaccgtcggcgtctcgcccgaccaccagggcaagggtctgggcagcgccgtcgtgctccccggagtggaggcggccgagcgcgccggggtgcccgccttcctggagacctccgcgccccgcaacctccccttctacgagcggctcggcttcaccgtcaccgccgacgtcgaggtgcccgaaggaccgcgcacctggtgcatgacccgcaagcccggtgcctga

SEQ ID NO: 22022 - DNA, 1965 bp, Artificial Sequence
  Synthetic Polynucleotide
atggccttaccagtgaccgccttgctcctgccgctggccttgctgctccacgccgccaggccggaggtgcagctggttgaatctggtggcggagttgtgcagcctggcagaagcctgagactgtcttgtgccgccagcggctttagcttcagcggctatggaatgcactgggtccgacaggcccctggcaaaggacttgagtgggtcgcctacatcagctacgacggcagcaacaagtattacgccgacagcgtgaagggcagattcaccatcagccgggacaacagcaagaacaccctgtacctccagatgaacagcctgagagccgaggacaccgccgtgtactactgcgccaaagatcctgcctggggactgagactgggcgagagcagcagctacgatttcgacatctggggccagggcacaatggtcacagtttctagcggatccggcggaggcggaagtggaggcggaggatctggcggcggaggctctttcgaagttcagctgctggaatctggcggaggactcgttcaacctggcggctctctgagactgagctgtgccgcttctggcttcagcttctctagctacgccctgagctgggttcgacaagctcccggaaagggccttgaatgggtgtccagcatcggcgagaatgacggcaccacagactatgccgatgccgtgaaaggccggtttaccatcagcagagacaattccaagaacacgctctatctgcaaatgaactccctgcgcgtggaagatacagccgtgtattattgcgtgaaggacggcgtgcactggggacagggaaccctggttacagtgtctagcacgcgtatccagaaccctgatcctgccgtgtaccagctgcgggatagcaagagcagcgacaagagcgtgtgtctgttcaccgacttcgacagccagaccaacgtgtcccagagcaaggactccgacgtgtacatcaccgataagtgcgtgctggacatgcggagcatggacttcaagagcaactccgccgtggcctggtccaacaagtccgatttcgcctgcgccaacgccttcaacaacagcattatccccgaggacacattcttcccaagccccgagagcagctgcgacgtgaagctggtggaaaagagcttcgagacagacaccaacctgaacttccagaacctgagcgtgatcggcttcagaatcctgctgctgaaagtggccggctttaacctgctgatgaccctgcggctgtggtccagccgcgccaagagaagcggatctggcgtgaagcagaccctgaatttcgacctgctgaagctggctggcgacgtggaatccaacccaggcccttctagaggccatatgaccgagtacaagcccacggtgcgcctcgccacccgcgacgacgtccccagggccgtacgcaccctcgccgccgcgttcgccgactaccccgccacgcgccacaccgtcgatccggaccgccacatcgagcgggtcaccgagctgcaagaactcttcctcacgcgcgtcgggctcgacatcggcaaggtgtgggtcgcggacgacggcgccgcggtggcggtctggaccacgccggagagcgtcgaagcgggggcggtgttcgccgagatcggcccgcgcatggccgagttgagcggttcccggctggccgcgcagcaacagatggaaggcctcctggcgccgcaccggcccaaggagcccgcgtggttcctggccaccgtcggcgtctcgcccgaccaccagggcaagggtctgggcagcgccgtcgtgctccccggagtggaggcggccgagcgcgccggggtgcccgccttcctggagacctccgcgccccgcaacctccccttctacgagcggctcggcttcaccgtcaccgccgacgtcgaggtgcccgaaggaccgcgcacctggtgcatgacccgcaagcccggtgcctga

SEQ ID NO: 22023 - DNA, 1653 bp, Artificial Sequence; identical to SEQ ID NO: 6944
  Synthetic Polynucleotide

SEQ ID NO: 22024 - DNA, 1764 bp, Artificial Sequence
  Synthetic Polynucleotide
atggccttaccagtgaccgccttgctcctgccgctggccttgctgctccacgccgccaggccgcagctccagctgcaagagtctggacctggcctggtcaagcctagcgagacactgagcctgacctgtaccgtgtccggcgatagcatcagcagcggcgattactactggggctggatcagacagcctcctggcaaaggactggaatggatcggccacatctactacagcggcgtgacctactacaaccccagcctgaagtccagagtgaccatcagcgtggacaccagccggaaccagttctccctgaagctgtctagcgtgacagccgccgataccgccgtgtactactgcaccagagaggacagcagcaactggcggagtagaggccagggaacactggtcacagttagctctctcgagagcggcggaggcggatctttcgaacagctccagttgcaagagagcggccctggcttggtaaaaccttccgagacccttagcctcacatgcacggttagtgggggcagcatttcctcaggtgattactattggggatggattcggcaacccccgggtaaaggattggagtggattggtcatatttattatagtggagcgacgtactacaacccaagtctcaaatccagggttacaatatccgtcgatacgagcaggaaccaattcagcttgaaactttctagtgtcaccgcagcagacacagccgtctattactgtacgcgggatgactccagtaattggcggtcccgagggcaagggacactggtcacggtctcctcaacgcgtgagcagaaactgatctcggaagaggatgggagcggcatccagaaccctgatcctgccgtgtaccagctgcgggatagcaagagcagcgacaagagcgtgtgtctgttcaccgacttcgacagccagaccaacgtgtcccagagcaaggactccgacgtgtacatcaccgataagtgcgtgctggacatgcggagcatggacttcaagagcaactccgccgtggcctggtccaacaagtccgatttcgcctgcgccaacgccttcaacaacagcattatccccgaggacacattcttcccaagcagcgacgtgccctgcgacgtgaagctggtggaaaagagcttcgagacagacaccaacctgaacttccagaacctgagcgtgatcggcttcagaatcctgctgctgaaagtggccggctttaacctgctgatgaccctgcggctgtggtccagccgcgccaagagaagcggatctggcgtgaagcagaccctgaatttcgacctgctgaagctggctggcgacgtggaatccaacccaggcccttctagaggccgtatggccaagcctttgtctcaagaagaatccaccctcattgaaagagcaacggctacaatcaacagcatccccatctctgaagactacagcgtcgccagcgcagctctctctagcgacggccgcatcttcactggtgtcaatgtatatcattttactgggggaccttgtgcagaactcgtggtgctgggcactgctgctgctgcggcagctggcaacctgacttgtatcgtcgcgatcggaaatgagaacaggggcatcttgagcccctgcggacggtgccgacaggtgcttctcgatctgcatcctgggatcaaagccatagtgaaggacagtgatggacagccgacggcagttgggattcgtgaattgctgccctctggttatgtgtgggagggctaa

SEQ ID NO: 22025 - DNA, 2040 bp, Artificial Sequence; identical to SEQ ID NO: 6818
  Synthetic Polynucleotide

SEQ ID NO: 22026 - DNA, 2301 bp, Artificial Sequence
  Synthetic Polynucleotide
atggccttaccagtgaccgccttgctcctgccgctggccttgctgctccacgccgccaggccgcagctccagctgcaagagtctggacctggcctggtcaagcctagcgagacactgagcctgacctgtaccgtgtccggcgatagcatcagcagcggcgattactactggggctggatcagacagcctcctggcaaaggactggaatggatcggccacatctactacagcggcgtgacctactacaaccccagcctgaagtccagagtgaccatcagcgtggacaccagccggaaccagttctccctgaagctgtctagcgtgacagccgccgataccgccgtgtactactgcaccagagaggacagcagcaactggcggagtagaggccagggaacactggtcacagttagctctctcgaggacaaaactcacacatgcccaccgtgcccagctatccccgaggacacattcttcccaagccccgagagcagctgcgacgtgaagctggtggaaaagagcttcgagacagacaccaacctgaacttccagaacctgagcgtgatcggcttcagaatcctgctgctgaaagtggccggctttaacctgctgatgaccctgcggctgtggtccagccgcgccaagagaagcggatctggcgtgaagcagaccctgaatttcgacctgctgaagctggctggcgacgtggaatccaacccaggccctactagtatggactggatttggcgcatccttttccttgtcggcgctgctaccggcgcgcattccttcgaagttcagttggtagagtctggaggcggagtggtacaaccggggcggtctcttagacttagttgcgcagcaagcggtttctctttctctggctatgggatgcactgggtgagacaggcccctgggaaaggactggagtgggtggcctacatttcatacgacgggagtaataaatactatgcagactccgttaagggcaggttcacgatctctcgggacaattccaagaatacattgtatcttcagatgaatagtctccgagctgaagacacggcggtttactactgcgctaaagacccggcctggggacttcgacttggagagagttctagctacgattttgacatttggggacaagggacaatggtcactgtctcaagtacgcgtatccagaaccctgatcctgccgtgtaccagctgcgggatagcaagagcagcgacaagagcgtgtgtctgttcaccgacttcgacagccagaccaacgtgtcccagagcaaggactccgacgtgtacatcaccgataagtgcgtgctggacatgcggagcatggacttcaagagcaactccgccgtggcctggtccaacaagtccgatttcgcctgcgccaacgccttcaacaacagcattatccccgaggacacattcttcccaagccccgagagcagctgcgacgtgaagctggtggaaaagagcttcgagacagacaccaacctgaacttccagaacctgagcgtgatcggcttcagaatcctgctgctgaaagtggccggctttaacctgctgatgaccctgcggctgtggtccagccgcgccaagagaagcggatctggcgtgaagcagaccctgaatttcgacctgctgaagctggctggcgacgtggaatccaacccaggcccttctagaggccatatgaccgagtacaagcccacggtgcgcctcgccacccgcgacgacgtccccagggccgtacgcaccctcgccgccgcgttcgccgactaccccgccacgcgccacaccgtcgatccggaccgccacatcgagcgggtcaccgagctgcaagaactcttcctcacgcgcgtcgggctcgacatcggcaaggtgtgggtcgcggacgacggcgccgcggtggcggtctggaccacgccggagagcgtcgaagcgggggcggtgttcgccgagatcggcccgcgcatggccgagttgagcggttcccggctggccgcgcagcaacagatggaaggcctcctggcgccgcaccggcccaaggagcccgcgtggttcctggccaccgtcggcgtctcgcccgaccaccagggcaagggtctgggcagcgccgtcgtgctccccggagtggaggcggccgagcgcgccggggtgcccgccttcctggagacctccgcgccccgcaacctccccttctacgagcggctcggcttcaccgtcaccgccgacgtcgaggtgcccgaaggaccgcgcacctggtgcatgacccgcaagcccggtgcctga

SEQ ID NO: 22027 - DNA, 2238 bp, Artificial Sequence
  Synthetic Polynucleotide
atggccttaccagtgaccgccttgctcctgccgctggccttgctgctccacgccgccaggccgcagctccagctgcaagagtctggacctggcctggtcaagcctagcgagacactgagcctgacctgtaccgtgtccggcgatagcatcagcagcggcgattactactggggctggatcagacagcctcctggcaaaggactggaatggatcggccacatctactacagcggcgtgacctactacaaccccagcctgaagtccagagtgaccatcagcgtggacaccagccggaaccagttctccctgaagctgtctagcgtgacagccgccgataccgccgtgtactactgcaccagagaggacagcagcaactggcggagtagaggccagggaacactggtcacagttagctctctcgagggatctgccgattgcggctttaccagcgagagctaccagcagggcgtgctgagcgccaccatcctgtacgagatcctgctgggcaaggccaccctgtacgccgtgctggtgtctgccctggtgctgatggctatggtcaagcggaaggacagccggggaagggccaagcgatctggatctggagcaacaaacttctcactactcaaacaagcaggtgacgtggaggagaatcccgggcctactagtatggactggatttggcgcatccttttccttgtcggcgctgctaccggcgcgcattccttcgaagttcagttggtagagtctggaggcggagtggtacaaccggggcggtctcttagacttagttgcgcagcaagcggtttctctttctctggctatgggatgcactgggtgagacaggcccctgggaaaggactggagtgggtggcctacatttcatacgacgggagtaataaatactatgcagactccgttaagggcaggttcacgatctctcgggacaattccaagaatacattgtatcttcagatgaatagtctccgagctgaagacacggcggtttactactgcgctaaagacccggcctggggacttcgacttggagagagttctagctacgattttgacatttggggacaagggacaatggtcactgtctcaagtacgcgtatccagaaccctgatcctgccgtgtaccagctgcgggatagcaagagcagcgacaagagcgtgtgtctgttcaccgacttcgacagccagaccaacgtgtcccagagcaaggactccgacgtgtacatcaccgataagtgcgtgctggacatgcggagcatggacttcaagagcaactccgccgtggcctggtccaacaagtccgatttcgcctgcgccaacgccttcaacaacagcattatccccgaggacacattcttcccaagccccgagagcagctgcgacgtgaagctggtggaaaagagcttcgagacagacaccaacctgaacttccagaacctgagcgtgatcggcttcagaatcctgctgctgaaagtggccggctttaacctgctgatgaccctgcggctgtggtccagccgcgccaagagaagcggatctggcgtgaagcagaccctgaatttcgacctgctgaagctggctggcgacgtggaatccaacccaggcccttctagaggccatatgaccgagtacaagcccacggtgcgcctcgccacccgcgacgacgtccccagggccgtacgcaccctcgccgccgcgttcgccgactaccccgccacgcgccacaccgtcgatccggaccgccacatcgagcgggtcaccgagctgcaagaactcttcctcacgcgcgtcgggctcgacatcggcaaggtgtgggtcgcggacgacggcgccgcggtggcggtctggaccacgccggagagcgtcgaagcgggggcggtgttcgccgagatcggcccgcgcatggccgagttgagcggttcccggctggccgcgcagcaacagatggaaggcctcctggcgccgcaccggcccaaggagcccgcgtggttcctggccaccgtcggcgtctcgcccgaccaccagggcaagggtctgggcagcgccgtcgtgctccccggagtggaggcggccgagcgcgccggggtgcccgccttcctggagacctccgcgccccgcaacctccccttctacgagcggctcggcttcaccgtcaccgccgacgtcgaggtgcccgaaggaccgcgcacctggtgcatgacccgcaagcccggtgcctga

SEQ ID NO: 22028 - DNA, 2274 bp, Artificial Sequence
  Synthetic Polynucleotide
atggccttaccagtgaccgccttgctcctgccgctggccttgctgctccacgccgccaggccgcagctccagctgcaagagtctggacctggcctggtcaagcctagcgagacactgagcctgacctgtaccgtgtccggcgatagcatcagcagcggcgattactactggggctggatcagacagcctcctggcaaaggactggaatggatcggccacatctactacagcggcgtgacctactacaaccccagcctgaagtccagagtgaccatcagcgtggacaccagccggaaccagttctccctgaagctgtctagcgtgacagccgccgataccgccgtgtactactgcaccagagaggacagcagcaactggcggagtagaggccagggaacactggtcacagttagctctctcgagggctctatccccgaggacacattcttcccaagccccgagagcagctgcgacgtgaagctggtggaaaagagcttcgagacagacaccaacctgaacttccagaacctgagcgtgatcggcttcagaatcctgctgctgaaagtggccggctttaacctgctgatgaccctgcggctgtggtccagccgcgccaagagaagcggatctggcgtgaagcagaccctgaatttcgacctgctgaagctggctggcgacgtggaatccaacccaggccctactagtatggactggatttggcgcatccttttccttgtcggcgctgctaccggcgcgcattccttcgaagttcagttggtagagtctggaggcggagtggtacaaccggggcggtctcttagacttagttgcgcagcaagcggtttctctttctctggctatgggatgcactgggtgagacaggcccctgggaaaggactggagtgggtggcctacatttcatacgacgggagtaataaatactatgcagactccgttaagggcaggttcacgatctctcgggacaattccaagaatacattgtatcttcagatgaatagtctccgagctgaagacacggcggtttactactgcgctaaagacccggcctggggacttcgacttggagagagttctagctacgattttgacatttggggacaagggacaatggtcactgtctcaagtacgcgtatccagaaccctgatcctgccgtgtaccagctgcgggatagcaagagcagcgacaagagcgtgtgtctgttcaccgacttcgacagccagaccaacgtgtcccagagcaaggactccgacgtgtacatcaccgataagtgcgtgctggacatgcggagcatggacttcaagagcaactccgccgtggcctggtccaacaagtccgatttcgcctgcgccaacgccttcaacaacagcattatccccgaggacacattcttcccaagccccgagagcagctgcgacgtgaagctggtggaaaagagcttcgagacagacaccaacctgaacttccagaacctgagcgtgatcggcttcagaatcctgctgctgaaagtggccggctttaacctgctgatgaccctgcggctgtggtccagccgcgccaagagaagcggatctggcgtgaagcagaccctgaatttcgacctgctgaagctggctggcgacgtggaatccaacccaggcccttctagaggccatatgaccgagtacaagcccacggtgcgcctcgccacccgcgacgacgtccccagggccgtacgcaccctcgccgccgcgttcgccgactaccccgccacgcgccacaccgtcgatccggaccgccacatcgagcgggtcaccgagctgcaagaactcttcctcacgcgcgtcgggctcgacatcggcaaggtgtgggtcgcggacgacggcgccgcggtggcggtctggaccacgccggagagcgtcgaagcgggggcggtgttcgccgagatcggcccgcgcatggccgagttgagcggttcccggctggccgcgcagcaacagatggaaggcctcctggcgccgcaccggcccaaggagcccgcgtggttcctggccaccgtcggcgtctcgcccgaccaccagggcaagggtctgggcagcgccgtcgtgctccccggagtggaggcggccgagcgcgccggggtgcccgccttcctggagacctccgcgccccgcaacctccccttctacgagcggctcggcttcaccgtcaccgccgacgtcgaggtgcccgaaggaccgcgcacctggtgcatgacccgcaagcccggtgcctga

SEQ ID NO: 22029 - DNA, 2313 bp, Artificial Sequence
  Synthetic Polynucleotide
atggccttaccagtgaccgccttgctcctgccgctggccttgctgctccacgccgccaggccgcagctccagctgcaagagtctggacctggcctggtcaagcctagcgagacactgagcctgacctgtaccgtgtccggcgatagcatcagcagcggcgattactactggggctggatcagacagcctcctggcaaaggactggaatggatcggccacatctactacagcggcgtgacctactacaaccccagcctgaagtccagagtgaccatcagcgtggacaccagccggaaccagttctccctgaagctgtctagcgtgacagccgccgataccgccgtgtactactgcaccagagaggacagcagcaactggcggagtagaggccagggaacactggtcacagttagctctctcgaggacaaaactcacacatgcccaccgtgcccagcacccatcaagaccgatgtgattacaatggaccccaaggacaactgctccaaggacgccaacgataccctgctgctccagctgaccaacaccagcgcctactacatgtacttgttgctgctgctgaagtccgtggtgtacttcgccatcatcacatgctgcctgctgcggagaaccgccttctgctgcaacggcgagaagtctagggccaagcgatctggatctggagcaacaaacttctcactactcaaacaagcaggtgacgtggaggagaatcccgggcctactagtatggactggatttggcgcatccttttccttgtcggcgctgctaccggcgcgcattccttcgaagttcagttggtagagtctggaggcggagtggtacaaccggggcggtctcttagacttagttgcgcagcaagcggtttctctttctctggctatgggatgcactgggtgagacaggcccctgggaaaggactggagtgggtggcctacatttcatacgacgggagtaataaatactatgcagactccgttaagggcaggttcacgatctctcgggacaattccaagaatacattgtatcttcagatgaatagtctccgagctgaagacacggcggtttactactgcgctaaagacccggcctggggacttcgacttggagagagttctagctacgattttgacatttggggacaagggacaatggtcactgtctcaagtacgcgtatccagaaccctgatcctgccgtgtaccagctgcgggatagcaagagcagcgacaagagcgtgtgtctgttcaccgacttcgacagccagaccaacgtgtcccagagcaaggactccgacgtgtacatcaccgataagtgcgtgctggacatgcggagcatggacttcaagagcaactccgccgtggcctggtccaacaagtccgatttcgcctgcgccaacgccttcaacaacagcattatccccgaggacacattcttcccaagccccgagagcagctgcgacgtgaagctggtggaaaagagcttcgagacagacaccaacctgaacttccagaacctgagcgtgatcggcttcagaatcctgctgctgaaagtggccggctttaacctgctgatgaccctgcggctgtggtccagccgcgccaagagaagcggatctggcgtgaagcagaccctgaatttcgacctgctgaagctggctggcgacgtggaatccaacccaggcccttctagaggccatatgaccgagtacaagcccacggtgcgcctcgccacccgcgacgacgtccccagggccgtacgcaccctcgccgccgcgttcgccgactaccccgccacgcgccacaccgtcgatccggaccgccacatcgagcgggtcaccgagctgcaagaactcttcctcacgcgcgtcgggctcgacatcggcaaggtgtgggtcgcggacgacggcgccgcggtggcggtctggaccacgccggagagcgtcgaagcgggggcggtgttcgccgagatcggcccgcgcatggccgagttgagcggttcccggctggccgcgcagcaacagatggaaggcctcctggcgccgcaccggcccaaggagcccgcgtggttcctggccaccgtcggcgtctcgcccgaccaccagggcaagggtctgggcagcgccgtcgtgctccccggagtggaggcggccgagcgcgccggggtgcccgccttcctggagacctccgcgccccgcaacctccccttctacgagcggctcggcttcaccgtcaccgccgacgtcgaggtgcccgaaggaccgcgcacctggtgcatgacccgcaagcccggtgcctga

SEQ ID NO: 22030 - DNA, 2262 bp, Artificial Sequence
  Synthetic Polynucleotide
atggccttaccagtgaccgccttgctcctgccgctggccttgctgctccacgccgccaggccgcagctccagctgcaagagtctggacctggcctggtcaagcctagcgagacactgagcctgacctgtaccgtgtccggcgatagcatcagcagcggcgattactactggggctggatcagacagcctcctggcaaaggactggaatggatcggccacatctactacagcggcgtgacctactacaaccccagcctgaagtccagagtgaccatcagcgtggacaccagccggaaccagttctccctgaagctgtctagcgtgacagccgccgataccgccgtgtactactgcaccagagaggacagcagcaactggcggagtagaggccagggaacactggtcacagttagctctctcgagggatctatggaccccaaggacaactgctccaaggacgccaacgataccctgctgctccagctgaccaacaccagcgcctactacatgtacttgttgctgctgctgaagtccgtggtgtacttcgccatcatcacatgctgcctgctgcggagaaccgccttctgctgcaacggcgagaagtctagggccaagcgatctggatctggagcaacaaacttctcactactcaaacaagcaggtgacgtggaggagaatcccgggcctactagtatggactggatttggcgcatccttttccttgtcggcgctgctaccggcgcgcattccttcgaagttcagttggtagagtctggaggcggagtggtacaaccggggcggtctcttagacttagttgcgcagcaagcggtttctctttctctggctatgggatgcactgggtgagacaggcccctgggaaaggactggagtgggtggcctacatttcatacgacgggagtaataaatactatgcagactccgttaagggcaggttcacgatctctcgggacaattccaagaatacattgtatcttcagatgaatagtctccgagctgaagacacggcggtttactactgcgctaaagacccggcctggggacttcgacttggagagagttctagctacgattttgacatttggggacaagggacaatggtcactgtctcaagtacgcgtatccagaaccctgatcctgccgtgtaccagctgcgggatagcaagagcagcgacaagagcgtgtgtctgttcaccgacttcgacagccagaccaacgtgtcccagagcaaggactccgacgtgtacatcaccgataagtgcgtgctggacatgcggagcatggacttcaagagcaactccgccgtggcctggtccaacaagtccgatttcgcctgcgccaacgccttcaacaacagcattatccccgaggacacattcttcccaagccccgagagcagctgcgacgtgaagctggtggaaaagagcttcgagacagacaccaacctgaacttccagaacctgagcgtgatcggcttcagaatcctgctgctgaaagtggccggctttaacctgctgatgaccctgcggctgtggtccagccgcgccaagagaagcggatctggcgtgaagcagaccctgaatttcgacctgctgaagctggctggcgacgtggaatccaacccaggcccttctagaggccatatgaccgagtacaagcccacggtgcgcctcgccacccgcgacgacgtccccagggccgtacgcaccctcgccgccgcgttcgccgactaccccgccacgcgccacaccgtcgatccggaccgccacatcgagcgggtcaccgagctgcaagaactcttcctcacgcgcgtcgggctcgacatcggcaaggtgtgggtcgcggacgacggcgccgcggtggcggtctggaccacgccggagagcgtcgaagcgggggcggtgttcgccgagatcggcccgcgcatggccgagttgagcggttcccggctggccgcgcagcaacagatggaaggcctcctggcgccgcaccggcccaaggagcccgcgtggttcctggccaccgtcggcgtctcgcccgaccaccagggcaagggtctgggcagcgccgtcgtgctccccggagtggaggcggccgagcgcgccggggtgcccgccttcctggagacctccgcgccccgcaacctccccttctacgagcggctcggcttcaccgtcaccgccgacgtcgaggtgcccgaaggaccgcgcacctggtgcatgacccgcaagcccggtgcctga

SEQ ID NO: 22031 - DNA, 2286 bp, Artificial Sequence
  Synthetic Polynucleotide
atggccttaccagtgaccgccttgctcctgccgctggccttgctgctccacgccgccaggccgcagctccagctgcaagagtctggacctggcctggtcaagcctagcgagacactgagcctgacctgtaccgtgtccggcgatagcatcagcagcggcgattactactggggctggatcagacagcctcctggcaaaggactggaatggatcggccacatctactacagcggcgtgacctactacaaccccagcctgaagtccagagtgaccatcagcgtggacaccagccggaaccagttctccctgaagctgtctagcgtgacagccgccgataccgccgtgtactactgcaccagagaggacagcagcaactggcggagtagaggccagggaacactggtcacagttagctctctcgagggatctcccatcaagaccgatgtgattacaatggaccccaaggacaactgctccaaggacgccaacgataccctgctgctccagctgaccaacaccagcgcctactacatgtacttgttgctgctgctgaagtccgtggtgtacttcgccatcatcacatgctgcctgctgcggagaaccgccttctgctgcaacggcgagaagtctagggccaagcgatctggatctggagcaacaaacttctcactactcaaacaagcaggtgacgtggaggagaatcccgggcctactagtatggactggatttggcgcatccttttccttgtcggcgctgctaccggcgcgcattccttcgaagttcagttggtagagtctggaggcggagtggtacaaccggggcggtctcttagacttagttgcgcagcaagcggtttctctttctctggctatgggatgcactgggtgagacaggcccctgggaaaggactggagtgggtggcctacatttcatacgacgggagtaataaatactatgcagactccgttaagggcaggttcacgatctctcgggacaattccaagaatacattgtatcttcagatgaatagtctccgagctgaagacacggcggtttactactgcgctaaagacccggcctggggacttcgacttggagagagttctagctacgattttgacatttggggacaagggacaatggtcactgtctcaagtacgcgtatccagaaccctgatcctgccgtgtaccagctgcgggatagcaagagcagcgacaagagcgtgtgtctgttcaccgacttcgacagccagaccaacgtgtcccagagcaaggactccgacgtgtacatcaccgataagtgcgtgctggacatgcggagcatggacttcaagagcaactccgccgtggcctggtccaacaagtccgatttcgcctgcgccaacgccttcaacaacagcattatccccgaggacacattcttcccaagccccgagagcagctgcgacgtgaagctggtggaaaagagcttcgagacagacaccaacctgaacttccagaacctgagcgtgatcggcttcagaatcctgctgctgaaagtggccggctttaacctgctgatgaccctgcggctgtggtccagccgcgccaagagaagcggatctggcgtgaagcagaccctgaatttcgacctgctgaagctggctggcgacgtggaatccaacccaggcccttctagaggccatatgaccgagtacaagcccacggtgcgcctcgccacccgcgacgacgtccccagggccgtacgcaccctcgccgccgcgttcgccgactaccccgccacgcgccacaccgtcgatccggaccgccacatcgagcgggtcaccgagctgcaagaactcttcctcacgcgcgtcgggctcgacatcggcaaggtgtgggtcgcggacgacggcgccgcggtggcggtctggaccacgccggagagcgtcgaagcgggggcggtgttcgccgagatcggcccgcgcatggccgagttgagcggttcccggctggccgcgcagcaacagatggaaggcctcctggcgccgcaccggcccaaggagcccgcgtggttcctggccaccgtcggcgtctcgcccgaccaccagggcaagggtctgggcagcgccgtcgtgctccccggagtggaggcggccgagcgcgccggggtgcccgccttcctggagacctccgcgccccgcaacctccccttctacgagcggctcggcttcaccgtcaccgccgacgtcgaggtgcccgaaggaccgcgcacctggtgcatgacccgcaagcccggtgcctga

SEQ ID NO: 22032 - DNA, 2298 bp, Artificial Sequence
  Synthetic Polynucleotide
atggccttaccagtgaccgccttgctcctgccgctggccttgctgctccacgccgccaggccgcagctccagctgcaagagtctggacctggcctggtcaagcctagcgagacactgagcctgacctgtaccgtgtccggcgatagcatcagcagcggcgattactactggggctggatcagacagcctcctggcaaaggactggaatggatcggccacatctactacagcggcgtgacctactacaaccccagcctgaagtccagagtgaccatcagcgtggacaccagccggaaccagttctccctgaagctgtctagcgtgacagccgccgataccgccgtgtactactgcaccagagaggacagcagcaactggcggagtagaggccagggaacactggtcacagttagctctctcgagggctctgaagtgaaaaccgactccaccgaccacgtgaagcccaaagagacagagaacaccaagcagcccagcaagagctgccacaagcccaaggccatcgtgcacaccgagaaagtgaacatgatgagcctgaccgtgctgggcctgcggatgctgttcgccaaaaccgtggccgtgaacttcctgctgaccgccaagctgttcttcctccgcgccaagagaagcggatctggcgtgaagcagaccctgaatttcgacctgctgaagctggctggcgacgtggaatccaacccaggccctactagtatggactggatttggcgcatccttttccttgtcggcgctgctaccggcgcgcattccttcgaagttcagttggtagagtctggaggcggagtggtacaaccggggcggtctcttagacttagttgcgcagcaagcggtttctctttctctggctatgggatgcactgggtgagacaggcccctgggaaaggactggagtgggtggcctacatttcatacgacgggagtaataaatactatgcagactccgttaagggcaggttcacgatctctcgggacaattccaagaatacattgtatcttcagatgaatagtctccgagctgaagacacggcggtttactactgcgctaaagacccggcctggggacttcgacttggagagagttctagctacgattttgacatttggggacaagggacaatggtcactgtctcaagtacgcgtatccagaaccctgatcctgccgtgtaccagctgcgggatagcaagagcagcgacaagagcgtgtgtctgttcaccgacttcgacagccagaccaacgtgtcccagagcaaggactccgacgtgtacatcaccgataagtgcgtgctggacatgcggagcatggacttcaagagcaactccgccgtggcctggtccaacaagtccgatttcgcctgcgccaacgccttcaacaacagcattatccccgaggacacattcttcccaagccccgagagcagctgcgacgtgaagctggtggaaaagagcttcgagacagacaccaacctgaacttccagaacctgagcgtgatcggcttcagaatcctgctgctgaaagtggccggctttaacctgctgatgaccctgcggctgtggtccagccgcgccaagagaagcggatctggcgtgaagcagaccctgaatttcgacctgctgaagctggctggcgacgtggaatccaacccaggcccttctagaggccatatgaccgagtacaagcccacggtgcgcctcgccacccgcgacgacgtccccagggccgtacgcaccctcgccgccgcgttcgccgactaccccgccacgcgccacaccgtcgatccggaccgccacatcgagcgggtcaccgagctgcaagaactcttcctcacgcgcgtcgggctcgacatcggcaaggtgtgggtcgcggacgacggcgccgcggtggcggtctggaccacgccggagagcgtcgaagcgggggcggtgttcgccgagatcggcccgcgcatggccgagttgagcggttcccggctggccgcgcagcaacagatggaaggcctcctggcgccgcaccggcccaaggagcccgcgtggttcctggccaccgtcggcgtctcgcccgaccaccagggcaagggtctgggcagcgccgtcgtgctccccggagtggaggcggccgagcgcgccggggtgcccgccttcctggagacctccgcgccccgcaacctccccttctacgagcggctcggcttcaccgtcaccgccgacgtcgaggtgcccgaaggaccgcgcacctggtgcatgacccgcaagcccggtgcctga

SEQ ID NO: 22033 - DNA, 2325 bp, Artificial Sequence
  Synthetic Polynucleotide
atggccttaccagtgaccgccttgctcctgccgctggccttgctgctccacgccgccaggccgcagctccagctgcaagagtctggacctggcctggtcaagcctagcgagacactgagcctgacctgtaccgtgtccggcgatagcatcagcagcggcgattactactggggctggatcagacagcctcctggcaaaggactggaatggatcggccacatctactacagcggcgtgacctactacaaccccagcctgaagtccagagtgaccatcagcgtggacaccagccggaaccagttctccctgaagctgtctagcgtgacagccgccgataccgccgtgtactactgcaccagagaggacagcagcaactggcggagtagaggccagggaacactggtcacagttagctctctcgaggacaaaactcacacatgcccaccgtgcccagcagaagtgaaaaccgactccaccgaccacgtgaagcccaaagagacagagaacaccaagcagcccagcaagagctgccacaagcccaaggccatcgtgcacaccgagaaagtgaacatgatgagcctgaccgtgctgggcctgcggatgctgttcgccaaaaccgtggccgtgaacttcctgctgaccgccaagctgttcttcctccgcgccaagagaagcggatctggcgtgaagcagaccctgaatttcgacctgctgaagctggctggcgacgtggaatccaacccaggccctactagtatggactggatttggcgcatccttttccttgtcggcgctgctaccggcgcgcattccttcgaagttcagttggtagagtctggaggcggagtggtacaaccggggcggtctcttagacttagttgcgcagcaagcggtttctctttctctggctatgggatgcactgggtgagacaggcccctgggaaaggactggagtgggtggcctacatttcatacgacgggagtaataaatactatgcagactccgttaagggcaggttcacgatctctcgggacaattccaagaatacattgtatcttcagatgaatagtctccgagctgaagacacggcggtttactactgcgctaaagacccggcctggggacttcgacttggagagagttctagctacgattttgacatttggggacaagggacaatggtcactgtctcaagtacgcgtatccagaaccctgatcctgccgtgtaccagctgcgggatagcaagagcagcgacaagagcgtgtgtctgttcaccgacttcgacagccagaccaacgtgtcccagagcaaggactccgacgtgtacatcaccgataagtgcgtgctggacatgcggagcatggacttcaagagcaactccgccgtggcctggtccaacaagtccgatttcgcctgcgccaacgccttcaacaacagcattatccccgaggacacattcttcccaagccccgagagcagctgcgacgtgaagctggtggaaaagagcttcgagacagacaccaacctgaacttccagaacctgagcgtgatcggcttcagaatcctgctgctgaaagtggccggctttaacctgctgatgaccctgcggctgtggtccagccgcgccaagagaagcggatctggcgtgaagcagaccctgaatttcgacctgctgaagctggctggcgacgtggaatccaacccaggcccttctagaggccatatgaccgagtacaagcccacggtgcgcctcgccacccgcgacgacgtccccagggccgtacgcaccctcgccgccgcgttcgccgactaccccgccacgcgccacaccgtcgatccggaccgccacatcgagcgggtcaccgagctgcaagaactcttcctcacgcgcgtcgggctcgacatcggcaaggtgtgggtcgcggacgacggcgccgcggtggcggtctggaccacgccggagagcgtcgaagcgggggcggtgttcgccgagatcggcccgcgcatggccgagttgagcggttcccggctggccgcgcagcaacagatggaaggcctcctggcgccgcaccggcccaaggagcccgcgtggttcctggccaccgtcggcgtctcgcccgaccaccagggcaagggtctgggcagcgccgtcgtgctccccggagtggaggcggccgagcgcgccggggtgcccgccttcctggagacctccgcgccccgcaacctccccttctacgagcggctcggcttcaccgtcaccgccgacgtcgaggtgcccgaaggaccgcgcacctggtgcatgacccgcaagcccggtgcctga

SEQ ID NO: 22034 - DNA, 1773 bp, Artificial Sequence
  Synthetic Polynucleotide
atggccttaccagtgaccgccttgctcctgccgctggccttgctgctccacgccgccaggccgcagctccagctgcaagagtctggacctggcctggtcaagcctagcgagacactgagcctgacctgtaccgtgtccggcgatagcatcagcagcggcgattactactggggctggatcagacagcctcctggcaaaggactggaatggatcggccacatctactacagcggcgtgacctactacaaccccagcctgaagtccagagtgaccatcagcgtggacaccagccggaaccagttctccctgaagctgtctagcgtgacagccgccgataccgccgtgtactactgcaccagagaggacagcagcaactggcggagtagaggccagggaacactggtcacagttagctctctcgagagcggcggaggcggatctttcgaagaggttcagctgcttgagtctggcggaggactggttcaacctggcggaagcctgagactgtcttgtgccgccagcggcttcacctttagcagctacgccatgagctgggtccgacaggctcctggcaaaggactggaatgggtgtccagcatcagcggcagcggcgactacatctactacgccgatagcgtgaagggcagattcaccatcagccgggacatcagcaagaacaccctgtacctccagatgaacagcctgagagccgaggacaccgccgtgtactactgtgccaaagaaggcaccggcgctaacagcagcctggccgattatagaggccagggcacactggtcaccgtgtctagtacgcgtgagcagaaactgatctcggaagaggatgggagcggcatccagaaccctgatcctgccgtgtaccagctgcgggatagcaagagcagcgacaagagcgtgtgtctgttcaccgacttcgacagccagaccaacgtgtcccagagcaaggactccgacgtgtacatcaccgataagtgcgtgctggacatgcggagcatggacttcaagagcaactccgccgtggcctggtccaacaagtccgatttcgcctgcgccaacgccttcaacaacagcattatccccgaggacacattcttcccaagcagcgacgtgccctgcgacgtgaagctggtggaaaagagcttcgagacagacaccaacctgaacttccagaacctgagcgtgatcggcttcagaatcctgctgctgaaagtggccggctttaacctgctgatgaccctgcggctgtggtccagccgcgccaagagaagcggatctggcgtgaagcagaccctgaatttcgacctgctgaagctggctggcgacgtggaatccaacccaggcccttctagaggccgtatggccaagcctttgtctcaagaagaatccaccctcattgaaagagcaacggctacaatcaacagcatccccatctctgaagactacagcgtcgccagcgcagctctctctagcgacggccgcatcttcactggtgtcaatgtatatcattttactgggggaccttgtgcagaactcgtggtgctgggcactgctgctgctgcggcagctggcaacctgacttgtatcgtcgcgatcggaaatgagaacaggggcatcttgagcccctgcggacggtgccgacaggtgcttctcgatctgcatcctgggatcaaagccatagtgaaggacagtgatggacagccgacggcagttgggattcgtgaattgctgccctctggttatgtgtgggagggctaa

SEQ ID NO: 22035 - DNA, 1929 bp, Artificial Sequence
  Synthetic Polynucleotide
atggccttaccagtgaccgccttgctcctgccgctggccttgctgctccacgccgccaggccgcagctccagctgcaagagtctggacctggcctggtcaagcctagcgagacactgagcctgacctgtaccgtgtccggcgatagcatcagcagcggcgattactactggggctggatcagacagcctcctggcaaaggactggaatggatcggccacatctactacagcggcgtgacctactacaaccccagcctgaagtccagagtgaccatcagcgtggacaccagccggaaccagttctccctgaagctgtctagcgtgacagccgccgataccgccgtgtactactgcaccagagaggacagcagcaactggcggagtagaggccagggaacactggtcacagttagctctctcgacagcggcggaggcggatctttcgaacagctccagttgcaagagagcggccctggcttggtaaaaccttccgagacccttagcctcacatgcacggttagtgggggcagcatttcctcaggtgattactattggggatggattcggcaacccccgggtaaaggattggagtggattggtcatatttattatagtggagcgacgtactacaacccaagtctcaaatccagggttacaatatccgtcgatacgagcaggaaccaattcagcttgaaactttctagtgtcaccgcagcagacacagccgtctattactgtacgcgggatgactccagtaattggcggtcccgagggcaagggacactggtcacggtctcctcaacgcgtatccagaaccctgatcctgccgtgtaccagctgcgggatagcaagagcagcgacaagagcgtgtgtctgttcaccgacttcgacagccagaccaacgtgtcccagagcaaggactccgacgtgtacatcaccgataagaccgtgctggacatgcggagcatggacttcaagagcaactccgccgtggcctggtccaacaagtccgatttcgcctgcgccaacgccttcaacaacagcattatccccgaggacacattcttcccaagccccgagagcagctgcgacgtgaagctggtggaaaagagcttcgagacagacaccaacctgaacttccagaacctgagcgtgatcggcttcagaatcctgctgctgaaagtggccggctttaacctgctgatgaccctgcggctgtggtccagccgcgccaagagaagcggatctggcgtgaagcagaccctgaatttcgacctgctgaagctggctggcgacgtggaatccaacccaggcccttctagaggccatatgaccgagtacaagcccacggtgcgcctcgccacccgcgacgacgtccccagggccgtacgcaccctcgccgccgcgttcgccgactaccccgccacgcgccacaccgtcgatccggaccgccacatcgagcgggtcaccgagctgcaagaactcttcctcacgcgcgtcgggctcgacatcggcaaggtgtgggtcgcggacgacggcgccgcggtggcggtctggaccacgccggagagcgtcgaagcgggggcggtgttcgccgagatcggcccgcgcatggccgagttgagcggttcccggctggccgcgcagcaacagatggaaggcctcctggcgccgcaccggcccaaggagcccgcgtggttcctggccaccgtcggcgtctcgcccgaccaccagggcaagggtctgggcagcgccgtcgtgctccccggagtggaggcggccgagcgcgccggggtgcccgccttcctggagacctccgcgccccgcaacctccccttctacgagcggctcggcttcaccgtcaccgccgacgtcgaggtgcccgaaggaccgcgcacctggtgcatgacccgcaagcccggtgcctga

SEQ ID NO: 22036 - DNA, 1650 bp, Artificial Sequence; identical to SEQ ID NO: 6506
  Synthetic Polynucleotide

SEQ ID NO: 22037 - DNA, 1338 bp, Artificial Sequence
  Synthetic Polynucleotide
atggccttaccagtgaccgccttgctcctgccgctggccttgctgctccacgccgccaggccgcagctccagctgcaagagtctggacctggcctggtcaagcctagcgagacactgagcctgacctgtaccgtgtccggcgatagcatcagcagcggcgattactactggggctggatcagacagcctcctggcaaaggactggaatggatcggccacatctactacagcggcgtgacctactacaaccccagcctgaagtccagagtgaccatcagcgtggacaccagccggaaccagttctccctgaagctgtctagcgtgacagccgccgataccgccgtgtactactgcaccagagaggacagcagcaactggcggagtagaggccagggaacactggtcacagttagctctctcgagggatctggcagagccgattgcggctttaccagcgagagctaccagcagggcgtgctgagcgccaccatcctgtacgagatcctgctgggcaaggccaccctgtacgccgtgctggtgtctgccctggtgctgatggctatggtcaagcggaaggacagccggggaagggccaagcgatctggatctggagcaacaaacttctcactactcaaacaagcaggtgacgtggaggagaatcccgggcctactagtatggactggatttggcgcatccttttccttgtcggcgctgctaccggcgcgcattccttcgaagtgcagctgcttgaaagtggcggcggactgattcagcctggcggatctctgagactgagctgtgccgccagcggcttcaccttttctagccacgccatgacctgggtccgacaggcacctggaaaagggcttgaatgggtgtccgccatcagcggctctggcgattacacacactacgccgacagcgtgaagggcagattcaccatcagcagagacaacagcaagaacaccgtgtacctccagatgaacagcctgagagccgaggacagcgccgtgtattattgcgccaaggatgaggatggcggcagcctgcttggacacagaggacaaggcaccctggtcaccgtttcttccacgcgtgataaaactcatacctgtccgccatgcccggcagaagtgaaaaccgactccaccgaccacgtgaagcccaaagagacagagaacaccaagcagcccagcaagagctgccacaagcccaaggccatcgtgcacaccgagaaagtgaacatgatgagcctgaccgtgctgggcctgcggatgctgttcgccaaaaccgtggccgtgaacttcctgctgaccgccaagctgttcttcctctaa

SEQ ID NO: 22038 - DNA, 1290 bp, Artificial Sequence
  Synthetic Polynucleotide
atggccttaccagtgaccgccttgctcctgccgctggccttgctgctccacgccgccaggccgcagctccagctgcaagagtctggacctggcctggtcaagcctagcgagacactgagcctgacctgtaccgtgtccggcgatagcatcagcagcggcgattactactggggctggatcagacagcctcctggcaaaggactggaatggatcggccacatctactacagcggcgtgacctactacaaccccagcctgaagtccagagtgaccatcagcgtggacaccagccggaaccagttctccctgaagctgtctagcgtgacagccgccgataccgccgtgtactactgcaccagagaggacagcagcaactggcggagtagaggccagggaacactggtcacagttagctctctcgagggatctggcagagccgattgcggctttaccagcgagagctaccagcagggcgtgctgagcgccaccatcctgtacgagatcctgctgggcaaggccaccctgtacgccgtgctggtgtctgccctggtgctgatggctatggtcaagcggaaggacagccggggaagggccaagcgatctggatctggagcaacaaacttctcactactcaaacaagcaggtgacgtggaggagaatcccgggcctactagtatggactggatttggcgcatccttttccttgtcggcgctgctaccggcgcgcattccttcgaagtgcagctgcttgaaagtggcggcggactgattcagcctggcggatctctgagactgagctgtgccgccagcggcttcaccttttctagccacgccatgacctgggtccgacaggcacctggaaaagggcttgaatgggtgtccgccatcagcggctctggcgattacacacactacgccgacagcgtgaagggcagattcaccatcagcagagacaacagcaagaacaccgtgtacctccagatgaacagcctgagagccgaggacagcgccgtgtattattgcgccaaggatgaggatggcggcagcctgcttggacacagaggacaaggcaccctggtcaccgtttcttccacgcgtggcagcgaccacgtgaagcccaaagagacagagaacaccaagcagcccagcaagagctgccacaagcccaaggccatcgtgcacaccgagaaagtgaacatgatgagcctgaccgtgctgggcctgcggatgctgttcgccaaaaccgtggccgtgaacttcctgctgaccgccaagctgttcttcctctaa

SEQ ID NO: 22039 - DNA, 1365 bp, Artificial Sequence
  Synthetic Polynucleotide
atggccttaccagtgaccgccttgctcctgccgctggccttgctgctccacgccgccaggccgcagctccagctgcaagagtctggacctggcctggtcaagcctagcgagacactgagcctgacctgtaccgtgtccggcgatagcatcagcagcggcgattactactggggctggatcagacagcctcctggcaaaggactggaatggatcggccacatctactacagcggcgtgacctactacaaccccagcctgaagtccagagtgaccatcagcgtggacaccagccggaaccagttctccctgaagctgtctagcgtgacagccgccgataccgccgtgtactactgcaccagagaggacagcagcaactggcggagtagaggccagggaacactggtcacagttagctctctcgaggacaaaactcacacatgcccaccgtgcccagcaggcagagccgattgcggctttaccagcgagagctaccagcagggcgtgctgagcgccaccatcctgtacgagatcctgctgggcaaggccaccctgtacgccgtgctggtgtctgccctggtgctgatggctatggtcaagcggaaggacagccggggaagggccaagcgatctggatctggagcaacaaacttctcactactcaaacaagcaggtgacgtggaggagaatcccgggcctactagtatggactggatttggcgcatccttttccttgtcggcgctgctaccggcgcgcattccttcgaagtgcagctgcttgaaagtggcggcggactgattcagcctggcggatctctgagactgagctgtgccgccagcggcttcaccttttctagccacgccatgacctgggtccgacaggcacctggaaaagggcttgaatgggtgtccgccatcagcggctctggcgattacacacactacgccgacagcgtgaagggcagattcaccatcagcagagacaacagcaagaacaccgtgtacctccagatgaacagcctgagagccgaggacagcgccgtgtattattgcgccaaggatgaggatggcggcagcctgcttggacacagaggacaaggcaccctggtcaccgtttcttccacgcgtgataaaactcatacctgtccgccatgcccggcagaagtgaaaaccgactccaccgaccacgtgaagcccaaagagacagagaacaccaagcagcccagcaagagctgccacaagcccaaggccatcgtgcacaccgagaaagtgaacatgatgagcctgaccgtgctgggcctgcggatgctgttcgccaaaaccgtggccgtgaacttcctgctgaccgccaagctgttcttcctctaa

SEQ ID NO: 22040 - DNA, 1317 bp, Artificial Sequence
  Synthetic Polynucleotide
atggccttaccagtgaccgccttgctcctgccgctggccttgctgctccacgccgccaggccgcagctccagctgcaagagtctggacctggcctggtcaagcctagcgagacactgagcctgacctgtaccgtgtccggcgatagcatcagcagcggcgattactactggggctggatcagacagcctcctggcaaaggactggaatggatcggccacatctactacagcggcgtgacctactacaaccccagcctgaagtccagagtgaccatcagcgtggacaccagccggaaccagttctccctgaagctgtctagcgtgacagccgccgataccgccgtgtactactgcaccagagaggacagcagcaactggcggagtagaggccagggaacactggtcacagttagctctctcgaggacaaaactcacacatgcccaccgtgcccagcaggcagagccgattgcggctttaccagcgagagctaccagcagggcgtgctgagcgccaccatcctgtacgagatcctgctgggcaaggccaccctgtacgccgtgctggtgtctgccctggtgctgatggctatggtcaagcggaaggacagccggggaagggccaagcgatctggatctggagcaacaaacttctcactactcaaacaagcaggtgacgtggaggagaatcccgggcctactagtatggactggatttggcgcatccttttccttgtcggcgctgctaccggcgcgcattccttcgaagtgcagctgcttgaaagtggcggcggactgattcagcctggcggatctctgagactgagctgtgccgccagcggcttcaccttttctagccacgccatgacctgggtccgacaggcacctggaaaagggcttgaatgggtgtccgccatcagcggctctggcgattacacacactacgccgacagcgtgaagggcagattcaccatcagcagagacaacagcaagaacaccgtgtacctccagatgaacagcctgagagccgaggacagcgccgtgtattattgcgccaaggatgaggatggcggcagcctgcttggacacagaggacaaggcaccctggtcaccgtttcttccacgcgtggcagcgaccacgtgaagcccaaagagacagagaacaccaagcagcccagcaagagctgccacaagcccaaggccatcgtgcacaccgagaaagtgaacatgatgagcctgaccgtgctgggcctgcggatgctgttcgccaaaaccgtggccgtgaacttcctgctgaccgccaagctgttcttcctctaa

SEQ ID NO: 22041 - DNA, 2013 bp, Artificial Sequence; identical to SEQ ID NO: 6817
  Synthetic Polynucleotide

SEQ ID NO: 22042 - DNA, 2031 bp, Artificial Sequence
  Synthetic Polynucleotide
atggccttaccagtgaccgccttgctcctgccgctggccttgctgctccacgccgccaggccgcagctccagctgcaagagtctggacctggcctggtcaagcctagcgagacactgagcctgacctgtaccgtgtccggcgatagcatcagcagcggcgattactactggggctggatcagacagcctcctggcaaaggactggaatggatcggccacatctactacagcggcgtgacctactacaaccccagcctgaagtccagagtgaccatcagcgtggacaccagccggaaccagttctccctgaagctgtctagcgtgacagccgccgataccgccgtgtactactgcaccagagaggacagcagcaactggcggagtagaggccagggaacactggtcacagttagctctctcgagggatctgccgattgcggctttaccagcgagagctaccagcagggcgtgctgagcgccaccatcctgtacgagatcctgctgggcaaggccaccctgtacgccgtgctggtgtctgccctggtgctgatggctatggtcaagcggaaggacagccggggaagggccaagcgatctggatctggagcaacaaacttctcactactcaaacaagcaggtgacgtggaggagaatcccgggcctactagtatggactggatttggcgcatccttttccttgtcggcgctgctaccggcgcgcattccttcgaagttcagttggtagagtctggaggcggagtggtacaaccggggcggtctcttagacttagttgcgcagcaagcggtttctctttctctggctatgggatgcactgggtgagacaggcccctgggaaaggactggagtgggtggcctacatttcatacgacgggagtaataaatactatgcagactccgttaagggcaggttcacgatctctcgggacaattccaagaatacattgtatcttcagatgaatagtctccgagctgaagacacggcggtttactactgcgctaaagacccggcctggggacttcgacttggagagagttctagctacgattttgacatttggggacaagggacaatggtcactgtctcaagtacgcgtgataaaactcatacctgtccgccatgcccggcaatccccgaggacacattcttcccaagccccgagagcagctgcgacgtgaagctggtggaaaagagcttcgagacagacaccaacctgaacttccagaacctgagcgtgatcggcttcagaatcctgctgctgaaagtggccggctttaacctgctgatgaccctgcggctgtggtccagccgcgccaagagaagcggatctggcgtgaagcagaccctgaatttcgacctgctgaagctggctggcgacgtggaatccaacccaggcccttctagaggccatatgaccgagtacaagcccacggtgcgcctcgccacccgcgacgacgtccccagggccgtacgcaccctcgccgccgcgttcgccgactaccccgccacgcgccacaccgtcgatccggaccgccacatcgagcgggtcaccgagctgcaagaactcttcctcacgcgcgtcgggctcgacatcggcaaggtgtgggtcgcggacgacggcgccgcggtggcggtctggaccacgccggagagcgtcgaagcgggggcggtgttcgccgagatcggcccgcgcatggccgagttgagcggttcccggctggccgcgcagcaacagatggaaggcctcctggcgccgcaccggcccaaggagcccgcgtggttcctggccaccgtcggcgtctcgcccgaccaccagggcaagggtctgggcagcgccgtcgtgctccccggagtggaggcggccgagcgcgccggggtgcccgccttcctggagacctccgcgccccgcaacctccccttctacgagcggctcggcttcaccgtcaccgccgacgtcgaggtgcccgaaggaccgcgcacctggtgcatgacccgcaagcccggtgcctga

SEQ ID NO: 22043 - DNA, 2106 bp, Artificial Sequence
  Synthetic Polynucleotide
atggccttaccagtgaccgccttgctcctgccgctggccttgctgctccacgccgccaggccgcagctccagctgcaagagtctggacctggcctggtcaagcctagcgagacactgagcctgacctgtaccgtgtccggcgatagcatcagcagcggcgattactactggggctggatcagacagcctcctggcaaaggactggaatggatcggccacatctactacagcggcgtgacctactacaaccccagcctgaagtccagagtgaccatcagcgtggacaccagccggaaccagttctccctgaagctgtctagcgtgacagccgccgataccgccgtgtactactgcaccagagaggacagcagcaactggcggagtagaggccagggaacactggtcacagttagctctctcgaggacaaaactcacacatgcccaccgtgcccagcacccatcaagaccgatgtgattacaatggaccccaaggacaactgctccaaggacgccaacgataccctgctgctccagctgaccaacaccagcgcctactacatgtacttgttgctgctgctgaagtccgtggtgtacttcgccatcatcacatgctgcctgctgcggagaaccgccttctgctgcaacggcgagaagtctagggccaagcgatctggatctggagcaacaaacttctcactactcaaacaagcaggtgacgtggaggagaatcccgggcctactagtatggactggatttggcgcatccttttccttgtcggcgctgctaccggcgcgcattccttcgaagttcagttggtagagtctggaggcggagtggtacaaccggggcggtctcttagacttagttgcgcagcaagcggtttctctttctctggctatgggatgcactgggtgagacaggcccctgggaaaggactggagtgggtggcctacatttcatacgacgggagtaataaatactatgcagactccgttaagggcaggttcacgatctctcgggacaattccaagaatacattgtatcttcagatgaatagtctccgagctgaagacacggcggtttactactgcgctaaagacccggcctggggacttcgacttggagagagttctagctacgattttgacatttggggacaagggacaatggtcactgtctcaagtacgcgtgataaaactcatacctgtccgccatgcccggcaatccccgaggacacattcttcccaagccccgagagcagctgcgacgtgaagctggtggaaaagagcttcgagacagacaccaacctgaacttccagaacctgagcgtgatcggcttcagaatcctgctgctgaaagtggccggctttaacctgctgatgaccctgcggctgtggtccagccgcgccaagagaagcggatctggcgtgaagcagaccctgaatttcgacctgctgaagctggctggcgacgtggaatccaacccaggcccttctagaggccatatgaccgagtacaagcccacggtgcgcctcgccacccgcgacgacgtccccagggccgtacgcaccctcgccgccgcgttcgccgactaccccgccacgcgccacaccgtcgatccggaccgccacatcgagcgggtcaccgagctgcaagaactcttcctcacgcgcgtcgggctcgacatcggcaaggtgtgggtcgcggacgacggcgccgcggtggcggtctggaccacgccggagagcgtcgaagcgggggcggtgttcgccgagatcggcccgcgcatggccgagttgagcggttcccggctggccgcgcagcaacagatggaaggcctcctggcgccgcaccggcccaaggagcccgcgtggttcctggccaccgtcggcgtctcgcccgaccaccagggcaagggtctgggcagcgccgtcgtgctccccggagtggaggcggccgagcgcgccggggtgcccgccttcctggagacctccgcgccccgcaacctccccttctacgagcggctcggcttcaccgtcaccgccgacgtcgaggtgcccgaaggaccgcgcacctggtgcatgacccgcaagcccggtgcctga

SEQ ID NO: 22044 - DNA, 2055 bp, Artificial Sequence
  Synthetic Polynucleotide
atggccttaccagtgaccgccttgctcctgccgctggccttgctgctccacgccgccaggccgcagctccagctgcaagagtctggacctggcctggtcaagcctagcgagacactgagcctgacctgtaccgtgtccggcgatagcatcagcagcggcgattactactggggctggatcagacagcctcctggcaaaggactggaatggatcggccacatctactacagcggcgtgacctactacaaccccagcctgaagtccagagtgaccatcagcgtggacaccagccggaaccagttctccctgaagctgtctagcgtgacagccgccgataccgccgtgtactactgcaccagagaggacagcagcaactggcggagtagaggccagggaacactggtcacagttagctctctcgagggatctatggaccccaaggacaactgctccaaggacgccaacgataccctgctgctccagctgaccaacaccagcgcctactacatgtacttgttgctgctgctgaagtccgtggtgtacttcgccatcatcacatgctgcctgctgcggagaaccgccttctgctgcaacggcgagaagtctagggccaagcgatctggatctggagcaacaaacttctcactactcaaacaagcaggtgacgtggaggagaatcccgggcctactagtatggactggatttggcgcatccttttccttgtcggcgctgctaccggcgcgcattccttcgaagttcagttggtagagtctggaggcggagtggtacaaccggggcggtctcttagacttagttgcgcagcaagcggtttctctttctctggctatgggatgcactgggtgagacaggcccctgggaaaggactggagtgggtggcctacatttcatacgacgggagtaataaatactatgcagactccgttaagggcaggttcacgatctctcgggacaattccaagaatacattgtatcttcagatgaatagtctccgagctgaagacacggcggtttactactgcgctaaagacccggcctggggacttcgacttggagagagttctagctacgattttgacatttggggacaagggacaatggtcactgtctcaagtacgcgtgataaaactcatacctgtccgccatgcccggcaatccccgaggacacattcttcccaagccccgagagcagctgcgacgtgaagctggtggaaaagagcttcgagacagacaccaacctgaacttccagaacctgagcgtgatcggcttcagaatcctgctgctgaaagtggccggctttaacctgctgatgaccctgcggctgtggtccagccgcgccaagagaagcggatctggcgtgaagcagaccctgaatttcgacctgctgaagctggctggcgacgtggaatccaacccaggcccttctagaggccatatgaccgagtacaagcccacggtgcgcctcgccacccgcgacgacgtccccagggccgtacgcaccctcgccgccgcgttcgccgactaccccgccacgcgccacaccgtcgatccggaccgccacatcgagcgggtcaccgagctgcaagaactcttcctcacgcgcgtcgggctcgacatcggcaaggtgtgggtcgcggacgacggcgccgcggtggcggtctggaccacgccggagagcgtcgaagcgggggcggtgttcgccgagatcggcccgcgcatggccgagttgagcggttcccggctggccgcgcagcaacagatggaaggcctcctggcgccgcaccggcccaaggagcccgcgtggttcctggccaccgtcggcgtctcgcccgaccaccagggcaagggtctgggcagcgccgtcgtgctccccggagtggaggcggccgagcgcgccggggtgcccgccttcctggagacctccgcgccccgcaacctccccttctacgagcggctcggcttcaccgtcaccgccgacgtcgaggtgcccgaaggaccgcgcacctggtgcatgacccgcaagcccggtgcctga

SEQ ID NO: 22045 - DNA, 2079 bp, Artificial Sequence
  Synthetic Polynucleotide
atggccttaccagtgaccgccttgctcctgccgctggccttgctgctccacgccgccaggccgcagctccagctgcaagagtctggacctggcctggtcaagcctagcgagacactgagcctgacctgtaccgtgtccggcgatagcatcagcagcggcgattactactggggctggatcagacagcctcctggcaaaggactggaatggatcggccacatctactacagcggcgtgacctactacaaccccagcctgaagtccagagtgaccatcagcgtggacaccagccggaaccagttctccctgaagctgtctagcgtgacagccgccgataccgccgtgtactactgcaccagagaggacagcagcaactggcggagtagaggccagggaacactggtcacagttagctctctcgagggatctcccatcaagaccgatgtgattacaatggaccccaaggacaactgctccaaggacgccaacgataccctgctgctccagctgaccaacaccagcgcctactacatgtacttgttgctgctgctgaagtccgtggtgtacttcgccatcatcacatgctgcctgctgcggagaaccgccttctgctgcaacggcgagaagtctagggccaagcgatctggatctggagcaacaaacttctcactactcaaacaagcaggtgacgtggaggagaatcccgggcctactagtatggactggatttggcgcatccttttccttgtcggcgctgctaccggcgcgcattccttcgaagttcagttggtagagtctggaggcggagtggtacaaccggggcggtctcttagacttagttgcgcagcaagcggtttctctttctctggctatgggatgcactgggtgagacaggcccctgggaaaggactggagtgggtggcctacatttcatacgacgggagtaataaatactatgcagactccgttaagggcaggttcacgatctctcgggacaattccaagaatacattgtatcttcagatgaatagtctccgagctgaagacacggcggtttactactgcgctaaagacccggcctggggacttcgacttggagagagttctagctacgattttgacatttggggacaagggacaatggtcactgtctcaagtacgcgtgataaaactcatacctgtccgccatgcccggcaatccccgaggacacattcttcccaagccccgagagcagctgcgacgtgaagctggtggaaaagagcttcgagacagacaccaacctgaacttccagaacctgagcgtgatcggcttcagaatcctgctgctgaaagtggccggctttaacctgctgatgaccctgcggctgtggtccagccgcgccaagagaagcggatctggcgtgaagcagaccctgaatttcgacctgctgaagctggctggcgacgtggaatccaacccaggcccttctagaggccatatgaccgagtacaagcccacggtgcgcctcgccacccgcgacgacgtccccagggccgtacgcaccctcgccgccgcgttcgccgactaccccgccacgcgccacaccgtcgatccggaccgccacatcgagcgggtcaccgagctgcaagaactcttcctcacgcgcgtcgggctcgacatcggcaaggtgtgggtcgcggacgacggcgccgcggtggcggtctggaccacgccggagagcgtcgaagcgggggcggtgttcgccgagatcggcccgcgcatggccgagttgagcggttcccggctggccgcgcagcaacagatggaaggcctcctggcgccgcaccggcccaaggagcccgcgtggttcctggccaccgtcggcgtctcgcccgaccaccagggcaagggtctgggcagcgccgtcgtgctccccggagtggaggcggccgagcgcgccggggtgcccgccttcctggagacctccgcgccccgcaacctccccttctacgagcggctcggcttcaccgtcaccgccgacgtcgaggtgcccgaaggaccgcgcacctggtgcatgacccgcaagcccggtgcctga

SEQ ID NO: 22046 - DNA, 1731 bp, Artificial Sequence
  Synthetic Polynucleotide
atggccttaccagtgaccgccttgctcctgccgctggccttgctgctccacgccgccaggccgcagctccagctgcaagagtctggacctggcctggtcaagcctagcgagacactgagcctgacctgtaccgtgtccggcgatagcatcagcagcggcgattactactggggctggatcagacagcctcctggcaaaggactggaatggatcggccacatctactacagcggcgtgacctactacaaccccagcctgaagtccagagtgaccatcagcgtggacaccagccggaaccagttctccctgaagctgtctagcgtgacagccgccgataccgccgtgtactactgcaccagagaggacagcagcaactggcggagtagaggccagggaacactggtcacagttagctctctcgagagcggcggaggcggatctttcgaagaggttcagctgcttgagtctggcggaggactggttcaacctggcggaagcctgagactgtcttgtgccgccagcggcttcacctttagcagctacgccatgagctgggtccgacaggctcctggcaaaggactggaatgggtgtccagcatcagcggcagcggcgactacatctactacgccgatagcgtgaagggcagattcaccatcagccgggacatcagcaagaacaccctgtacctccagatgaacagcctgagagccgaggacaccgccgtgtactactgtgccaaagaaggcaccggcgctaacagcagcctggccgattatagaggccagggcacactggtcaccgtgtctagtacgcgtgataaaactcatacctgtccgccatgcccggcaatccccgaggacacattcttcccaagccccgagagcagctgcgacgtgaagctggtggaaaagagcttcgagacagacaccaacctgaacttccagaacctgagcgtgatcggcttcagaatcctgctgctgaaagtggccggctttaacctgctgatgaccctgcggctgtggtccagccgcgccaagagaagcggatctggcgtgaagcagaccctgaatttcgacctgctgaagctggctggcgacgtggaatccaacccaggcccttctagaggccatatgaccgagtacaagcccacggtgcgcctcgccacccgcgacgacgtccccagggccgtacgcaccctcgccgccgcgttcgccgactaccccgccacgcgccacaccgtcgatccggaccgccacatcgagcgggtcaccgagctgcaagaactcttcctcacgcgcgtcgggctcgacatcggcaaggtgtgggtcgcggacgacggcgccgcggtggcggtctggaccacgccggagagcgtcgaagcgggggcggtgttcgccgagatcggcccgcgcatggccgagttgagcggttcccggctggccgcgcagcaacagatggaaggcctcctggcgccgcaccggcccaaggagcccgcgtggttcctggccaccgtcggcgtctcgcccgaccaccagggcaagggtctgggcagcgccgtcgtgctccccggagtggaggcggccgagcgcgccggggtgcccgccttcctggagacctccgcgccccgcaacctccccttctacgagcggctcggcttcaccgtcaccgccgacgtcgaggtgcccgaaggaccgcgcacctggtgcatgacccgcaagcccggtgcctga

SEQ ID NO: 22047 - DNA, 2289 bp, Artificial Sequence
  Synthetic Polynucleotide
atggccttaccagtgaccgccttgctcctgccgctggccttgctgctccacgccgccaggccgcagctccagctgcaagagtctggacctggcctggtcaagcctagcgagacactgagcctgacctgtaccgtgtccggcgatagcatcagcagcggcgattactactggggctggatcagacagcctcctggcaaaggactggaatggatcggccacatctactacagcggcgtgacctactacaaccccagcctgaagtccagagtgaccatcagcgtggacaccagccggaaccagttctccctgaagctgtctagcgtgacagccgccgataccgccgtgtactactgcaccagagaggacagcagcaactggcggagtagaggccagggaacactggtcacagttagctctctcgaggacaaaactcacacatgcccaccgtgcccagcacccatcaagaccgatgtgattacaatggaccccaaggacaactgctccaaggacgccaacgataccctgctgctccagctgaccaacaccagcgcctactacatgtacttgttgctgctgctgaagtccgtggtgtacttcgccatcatcacatgctgcctgctgcggagaaccgccttctgctgcaacggcgagaagtctagggccaagcgatctggatctggagcaacaaacttctcactactcaaacaagcaggtgacgtggaggagaatcccgggcctactagtatggactggatttggcgcatccttttccttgtcggcgctgctaccggcgcgcattccttcgaagtgcagctgcttgaaagtggcggcggactgattcagcctggcggatctctgagactgagctgtgccgccagcggcttcaccttttctagccacgccatgacctgggtccgacaggcacctggaaaagggcttgaatgggtgtccgccatcagcggctctggcgattacacacactacgccgacagcgtgaagggcagattcaccatcagcagagacaacagcaagaacaccgtgtacctccagatgaacagcctgagagccgaggacagcgccgtgtattattgcgccaaggatgaggatggcggcagcctgcttggacacagaggacaaggcaccctggtcaccgtttcttccacgcgtatccagaaccctgatcctgccgtgtaccagctgcgggatagcaagagcagcgacaagagcgtgtgtctgttcaccgacttcgacagccagaccaacgtgtcccagagcaaggactccgacgtgtacatcaccgataagtgcgtgctggacatgcggagcatggacttcaagagcaactccgccgtggcctggtccaacaagtccgatttcgcctgcgccaacgccttcaacaacagcattatccccgaggacacattcttcccaagccccgagagcagctgcgacgtgaagctggtggaaaagagcttcgagacagacaccaacctgaacttccagaacctgagcgtgatcggcttcagaatcctgctgctgaaagtggccggctttaacctgctgatgaccctgcggctgtggtccagccgcgccaagagaagcggatctggcgtgaagcagaccctgaatttcgacctgctgaagctggctggcgacgtggaatccaacccaggcccttctagaggccatatgaccgagtacaagcccacggtgcgcctcgccacccgcgacgacgtccccagggccgtacgcaccctcgccgccgcgttcgccgactaccccgccacgcgccacaccgtcgatccggaccgccacatcgagcgggtcaccgagctgcaagaactcttcctcacgcgcgtcgggctcgacatcggcaaggtgtgggtcgcggacgacggcgccgcggtggcggtctggaccacgccggagagcgtcgaagcgggggcggtgttcgccgagatcggcccgcgcatggccgagttgagcggttcccggctggccgcgcagcaacagatggaaggcctcctggcgccgcaccggcccaaggagcccgcgtggttcctggccaccgtcggcgtctcgcccgaccaccagggcaagggtctgggcagcgccgtcgtgctccccggagtggaggcggccgagcgcgccggggtgcccgccttcctggagacctccgcgccccgcaacctccccttctacgagcggctcggcttcaccgtcaccgccgacgtcgaggtgcccgaaggaccgcgcacctggtgcatgacccgcaagcccggtgcctga

SEQ ID NO: 22048 - DNA, 2676 bp, Artificial Sequence
  Synthetic Polynucleotide
atggccttaccagtgaccgccttgctcctgccgctggccttgctgctccacgccgccaggccgcaggtgcagctggttgaatctggcggaggactggttcagcctggcggatctctgagactgtcttgtgccgccagcggcttcaccttcaccaatcacgccatgagctgggtccgacaggcccctggaaaaggactggaactggtgtctagcatcagcggcaacggcagaaccacctactacgccgatagcgtgaagggcagattcaccatcagccgggacatcagcaagaacaccctggacctccagatgaacagcctgagagccgaggataccgccgtgtactactgtgccaaggatggcggagagacactggtggatagcagaggccagggcacactggtcacagtgtcatctctcgagggacagcctaaggccaatcctaccgtgacactgttccctccaagcagcgaagaactccaggccaacaaggccacacttgtgtgcctgatctccgacttctaccctggggctgtgacagtggcttggaaggccgatggatctcctgtgaaagccggcgtggaaaccaccaagccatccaagcagagcaacaacaaatacgccgccagctcctacctgagcctgacacctgagcagtggaagtcccacagatcctacagctgccaagtgacccacgaaggcagcaccgtggaaaagacagtggcccctacagagtgcagccccatcaagaccgatgtgattacaatggaccccaaggacaactgctccaaggacgccaacgataccctgctgctccagctgaccaacaccagcgcctactacatgtacttgttgctgctgctgaagtccgtggtgtacttcgccatcatcacatgctgcctgctgcggagaaccgccttctgctgcaacggcgagaagtctagggccaagcgatctggatctggagcaacaaacttctcactactcaaacaagcaggtgacgtggaggagaatcccgggcctactagtatggactggatttggcgcatccttttccttgtcggcgctgctaccggcgcgcattccttcgaagaggttcagctgcttgagtctggcggaggactggttcaacctggcggaagcctgagactgtcttgtgccgccagcggcttcacctttagcagctacgccatgagctgggtccgacaggctcctggcaaaggactggaatgggtgtccagcatcagcggcagcggcgactacatctactacgccgatagcgtgaagggcagattcaccatcagccgggacatcagcaagaacaccctgtacctccagatgaacagcctgagagccgaggacaccgccgtgtactactgtgccaaagaaggcaccggcgctaacagcagcctggccgattatagaggccagggcacactggtcaccgtgtctagtacgcgtgcctctacaaagggaccctccgtgtttcctctggctcccagcagcaagtctacaagcggaggaacagccgctctgggctgcctggtcaaggattactttcccgagcctgtgaccgtgtcctggaatagcggagcactgacaagcggcgtgcacacctttccagccgtgctgcaaagcagcggcctgtactctctgagcagcgtggtcacagtgcctagctctagcctgggcacccagacctacatctgcaatgtgaaccacaagcctagcaacaccaaggtggacaagagagtggaacccaagagctgtgaagtgaaaaccgactccaccgaccacgtgaagcccaaagagacagagaacaccaagcagcccagcaagagctgccacaagcccaaggccatcgtgcacaccgagaaagtgaacatgatgagcctgaccgtgctgggcctgcggatgctgttcgccaaaaccgtggccgtgaacttcctgctgaccgccaagctgttcttcctccgcgccaagagaagcggatctggcgtgaagcagaccctgaatttcgacctgctgaagctggctggcgacgtggaatccaacccaggcccttctagaggccatatgaccgagtacaagcccacggtgcgcctcgccacccgcgacgacgtccccagggccgtacgcaccctcgccgccgcgttcgccgactaccccgccacgcgccacaccgtcgatccggaccgccacatcgagcgggtcaccgagctgcaagaactcttcctcacgcgcgtcgggctcgacatcggcaaggtgtgggtcgcggacgacggcgccgcggtggcggtctggaccacgccggagagcgtcgaagcgggggcggtgttcgccgagatcggcccgcgcatggccgagttgagcggttcccggctggccgcgcagcaacagatggaaggcctcctggcgccgcaccggcccaaggagcccgcgtggttcctggccaccgtcggcgtctcgcccgaccaccagggcaagggtctgggcagcgccgtcgtgctccccggagtggaggcggccgagcgcgccggggtgcccgccttcctggagacctccgcgccccgcaacctccccttctacgagcggctcggcttcaccgtcaccgccgacgtcgaggtgcccgaaggaccgcgcacctggtgcatgacccgcaagcccggtgcctga

SEQ ID NO: 22049 - DNA, 2667 bp, Artificial Sequence; identical to SEQ ID NO: 6821
  Synthetic Polynucleotide

SEQ ID NO: 22050 - DNA, 2676 bp, Artificial Sequence; identical to SEQ ID NO: 22048
  Synthetic Polynucleotide

SEQ ID NO: 22051 - DNA, 1365 bp, Artificial Sequence; identical to SEQ ID NO: 22039
  Synthetic Polynucleotide

SEQ ID NO: 22052 - DNA, 2094 bp, Artificial Sequence
  Synthetic Polynucleotide
atggccttaccagtgaccgccttgctcctgccgctggccttgctgctccacgccgccaggccgcagctccagctgcaagagtctggacctggcctggtcaagcctagcgagacactgagcctgacctgtaccgtgtccggcgatagcatcagcagcggcgattactactggggctggatcagacagcctcctggcaaaggactggaatggatcggccacatctactacagcggcgtgacctactacaaccccagcctgaagtccagagtgaccatcagcgtggacaccagccggaaccagttctccctgaagctgtctagcgtgacagccgccgataccgccgtgtactactgcaccagagaggacagcagcaactggcggagtagaggccagggaacactggtcacagttagctctctcgaggacaaaactcacacatgcccaccgtgcccagcagaagtgaaaaccgactccaccgaccacgtgaagcccaaagagacagagaacaccaagcagcccagcaagagctgccacaagcccaaggccatcgtgcacaccgagaaagtgaacatgatgagcctgaccgtgctgggcctgcggatgctgttcgccaaaaccgtggccgtgaacttcctgctgaccgccaagctgttcttcctccgcgccaagagaagcggatctggcgtgaagcagaccctgaatttcgacctgctgaagctggctggcgacgtggaatccaacccaggccctactagtatggactggatttggcgcatccttttccttgtcggcgctgctaccggcgcgcattccttcgaagtgcagctgcttgaaagtggcggcggactgattcagcctggcggatctctgagactgagctgtgccgccagcggcttcaccttttctagccacgccatgacctgggtccgacaggcacctggaaaagggcttgaatgggtgtccgccatcagcggctctggcgattacacacactacgccgacagcgtgaagggcagattcaccatcagcagagacaacagcaagaacaccgtgtacctccagatgaacagcctgagagccgaggacagcgccgtgtattattgcgccaaggatgaggatggcggcagcctgcttggacacagaggacaaggcaccctggtcaccgtttcttccacgcgtgataaaactcatacctgtccgccatgcccggcaatccccgaggacacattcttcccaagccccgagagcagctgcgacgtgaagctggtggaaaagagcttcgagacagacaccaacctgaacttccagaacctgagcgtgatcggcttcagaatcctgctgctgaaagtggccggctttaacctgctgatgaccctgcggctgtggtccagccgcgccaagagaagcggatctggcgtgaagcagaccctgaatttcgacctgctgaagctggctggcgacgtggaatccaacccaggcccttctagaggccatatgaccgagtacaagcccacggtgcgcctcgccacccgcgacgacgtccccagggccgtacgcaccctcgccgccgcgttcgccgactaccccgccacgcgccacaccgtcgatccggaccgccacatcgagcgggtcaccgagctgcaagaactcttcctcacgcgcgtcgggctcgacatcggcaaggtgtgggtcgcggacgacggcgccgcggtggcggtctggaccacgccggagagcgtcgaagcgggggcggtgttcgccgagatcggcccgcgcatggccgagttgagcggttcccggctggccgcgcagcaacagatggaaggcctcctggcgccgcaccggcccaaggagcccgcgtggttcctggccaccgtcggcgtctcgcccgaccaccagggcaagggtctgggcagcgccgtcgtgctccccggagtggaggcggccgagcgcgccggggtgcccgccttcctggagacctccgcgccccgcaacctccccttctacgagcggctcggcttcaccgtcaccgccgacgtcgaggtgcccgaaggaccgcgcacctggtgcatgacccgcaagcccggtgcctga

SEQ ID NO: 22053 - DNA, 2106 bp, Artificial Sequence; identical to SEQ ID NO: 22043
  Synthetic Polynucleotide

SEQ ID NO: 22054 - DNA, 2022 bp, Artificial Sequence
  Synthetic Polynucleotide
atggccttaccagtgaccgccttgctcctgccgctggccttgctgctccacgccgccaggccgcagctccagctgcaagagtctggacctggcctggtcaagcctagcgagacactgagcctgacctgtaccgtgtccggcgatagcatcagcagcggcgattactactggggctggatcagacagcctcctggcaaaggactggaatggatcggccacatctactacagcggcgtgacctactacaaccccagcctgaagtccagagtgaccatcagcgtggacaccagccggaaccagttctccctgaagctgtctagcgtgacagccgccgataccgccgtgtactactgcaccagagaggacagcagcaactggcggagtagaggccagggaacactggtcacagttagctctctcgagggatctcccatcaagaccgatgtgattacaatggaccccaaggacaactgctccaaggacgccaacgataccctgctgctccagctgaccaacaccagcgcctactacatgtacttgttgctgctgctgaagtccgtggtgtacttcgccatcatcacatgctgcctgctgcggagaaccgccttctgctgcaacggcgagaagtctagggccaagcgatctggatctggagcaacaaacttctcactactcaaacaagcaggtgacgtggaggagaatcccgggcctactagtatggactggatttggcgcatccttttccttgtcggcgctgctaccggcgcgcattccttcgaagttcagttggtagagtctggaggcggagtggtacaaccggggcggtctcttagacttagttgcgcagcaagcggtttctctttctctggctatgggatgcactgggtgagacaggcccctgggaaaggactggagtgggtggcctacatttcatacgacgggagtaataaatactatgcagactccgttaagggcaggttcacgatctctcgggacaattccaagaatacattgtatcttcagatgaatagtctccgagctgaagacacggcggtttactactgcgctaaagacccggcctggggacttcgacttggagagagttctagctacgattttgacatttggggacaagggacaatggtcactgtctcaagtacgcgtggatctggcagagccgattgcggctttaccagcgagagctaccagcagggcgtgctgagcgccaccatcctgtacgagatcctgctgggcaaggccaccctgtacgccgtgctggtgtctgccctggtgctgatggctatggtcaagcggaaggacagccggggaagggccaagcgatctggatctggagcaacaaacttctcactactcaaacaagcaggtgacgtggaggagaatcccgggccttctagaggccatatgaccgagtacaagcccacggtgcgcctcgccacccgcgacgacgtccccagggccgtacgcaccctcgccgccgcgttcgccgactaccccgccacgcgccacaccgtcgatccggaccgccacatcgagcgggtcaccgagctgcaagaactcttcctcacgcgcgtcgggctcgacatcggcaaggtgtgggtcgcggacgacggcgccgcggtggcggtctggaccacgccggagagcgtcgaagcgggggcggtgttcgccgagatcggcccgcgcatggccgagttgagcggttcccggctggccgcgcagcaacagatggaaggcctcctggcgccgcaccggcccaaggagcccgcgtggttcctggccaccgtcggcgtctcgcccgaccaccagggcaagggtctgggcagcgccgtcgtgctccccggagtggaggcggccgagcgcgccggggtgcccgccttcctggagacctccgcgccccgcaacctccccttctacgagcggctcggcttcaccgtcaccgccgacgtcgaggtgcccgaaggaccgcgcacctggtgcatgacccgcaagcccggtgcctga

SEQ ID NO: 22055 - DNA, 2034 bp, Artificial Sequence
  Synthetic Polynucleotide
atggccttaccagtgaccgccttgctcctgccgctggccttgctgctccacgccgccaggccgcagctccagctgcaagagtctggacctggcctggtcaagcctagcgagacactgagcctgacctgtaccgtgtccggcgatagcatcagcagcggcgattactactggggctggatcagacagcctcctggcaaaggactggaatggatcggccacatctactacagcggcgtgacctactacaaccccagcctgaagtccagagtgaccatcagcgtggacaccagccggaaccagttctccctgaagctgtctagcgtgacagccgccgataccgccgtgtactactgcaccagagaggacagcagcaactggcggagtagaggccagggaacactggtcacagttagctctctcgagggctctgaagtgaaaaccgactccaccgaccacgtgaagcccaaagagacagagaacaccaagcagcccagcaagagctgccacaagcccaaggccatcgtgcacaccgagaaagtgaacatgatgagcctgaccgtgctgggcctgcggatgctgttcgccaaaaccgtggccgtgaacttcctgctgaccgccaagctgttcttcctccgcgccaagagaagcggatctggcgtgaagcagaccctgaatttcgacctgctgaagctggctggcgacgtggaatccaacccaggccctactagtatggactggatttggcgcatccttttccttgtcggcgctgctaccggcgcgcattccttcgaagttcagttggtagagtctggaggcggagtggtacaaccggggcggtctcttagacttagttgcgcagcaagcggtttctctttctctggctatgggatgcactgggtgagacaggcccctgggaaaggactggagtgggtggcctacatttcatacgacgggagtaataaatactatgcagactccgttaagggcaggttcacgatctctcgggacaattccaagaatacattgtatcttcagatgaatagtctccgagctgaagacacggcggtttactactgcgctaaagacccggcctggggacttcgacttggagagagttctagctacgattttgacatttggggacaagggacaatggtcactgtctcaagtacgcgtggatctggcagagccgattgcggctttaccagcgagagctaccagcagggcgtgctgagcgccaccatcctgtacgagatcctgctgggcaaggccaccctgtacgccgtgctggtgtctgccctggtgctgatggctatggtcaagcggaaggacagccggggaagggccaagcgatctggatctggagcaacaaacttctcactactcaaacaagcaggtgacgtggaggagaatcccgggccttctagaggccatatgaccgagtacaagcccacggtgcgcctcgccacccgcgacgacgtccccagggccgtacgcaccctcgccgccgcgttcgccgactaccccgccacgcgccacaccgtcgatccggaccgccacatcgagcgggtcaccgagctgcaagaactcttcctcacgcgcgtcgggctcgacatcggcaaggtgtgggtcgcggacgacggcgccgcggtggcggtctggaccacgccggagagcgtcgaagcgggggcggtgttcgccgagatcggcccgcgcatggccgagttgagcggttcccggctggccgcgcagcaacagatggaaggcctcctggcgccgcaccggcccaaggagcccgcgtggttcctggccaccgtcggcgtctcgcccgaccaccagggcaagggtctgggcagcgccgtcgtgctccccggagtggaggcggccgagcgcgccggggtgcccgccttcctggagacctccgcgccccgcaacctccccttctacgagcggctcggcttcaccgtcaccgccgacgtcgaggtgcccgaaggaccgcgcacctggtgcatgacccgcaagcccggtgcctga

SEQ ID NO: 22056 - DNA, 2043 bp, Artificial Sequence
  Synthetic Polynucleotide
atggccttaccagtgaccgccttgctcctgccgctggccttgctgctccacgccgccaggccgcagctccagctgcaagagtctggacctggcctggtcaagcctagcgagacactgagcctgacctgtaccgtgtccggcgatagcatcagcagcggcgattactactggggctggatcagacagcctcctggcaaaggactggaatggatcggccacatctactacagcggcgtgacctactacaaccccagcctgaagtccagagtgaccatcagcgtggacaccagccggaaccagttctccctgaagctgtctagcgtgacagccgccgataccgccgtgtactactgcaccagagaggacagcagcaactggcggagtagaggccagggaacactggtcacagttagctctctcgagggatctcccatcaagaccgatgtgattacaatggaccccaaggacaactgctccaaggacgccaacgataccctgctgctccagctgaccaacaccagcgcctactacatgtacttgttgctgctgctgaagtccgtggtgtacttcgccatcatcacatgctgcctgctgcggagaaccgccttctgctgcaacggcgagaagtctagggccaagcgatctggatctggagcaacaaacttctcactactcaaacaagcaggtgacgtggaggagaatcccgggcctactagtatggactggatttggcgcatccttttccttgtcggcgctgctaccggcgcgcattccttcgaagttcagttggtagagtctggaggcggagtggtacaaccggggcggtctcttagacttagttgcgcagcaagcggtttctctttctctggctatgggatgcactgggtgagacaggcccctgggaaaggactggagtgggtggcctacatttcatacgacgggagtaataaatactatgcagactccgttaagggcaggttcacgatctctcgggacaattccaagaatacattgtatcttcagatgaatagtctccgagctgaagacacggcggtttactactgcgctaaagacccggcctggggacttcgacttggagagagttctagctacgattttgacatttggggacaagggacaatggtcactgtctcaagtacgcgtgataaaactcatacctgtccgccatgcccggcaggacgcgccgattgcggctttaccagcgagagctaccagcagggcgtgctgtctgccaccatcctgtacgagatcctgctgggcaaggccaccctgtacgccgtgctggtgtccgccctggtgctgatggctatggtgaagcggaaggacttcagggccaagcgatctggatctggagcaacaaacttctcactactcaaacaagcaggtgacgtggaggagaatcccgggccttctagaggccatatgaccgagtacaagcccacggtgcgcctcgccacccgcgacgacgtccccagggccgtacgcaccctcgccgccgcgttcgccgactaccccgccacgcgccacaccgtcgatccggaccgccacatcgagcgggtcaccgagctgcaagaactcttcctcacgcgcgtcgggctcgacatcggcaaggtgtgggtcgcggacgacggcgccgcggtggcggtctggaccacgccggagagcgtcgaagcgggggcggtgttcgccgagatcggcccgcgcatggccgagttgagcggttcccggctggccgcgcagcaacagatggaaggcctcctggcgccgcaccggcccaaggagcccgcgtggttcctggccaccgtcggcgtctcgcccgaccaccagggcaagggtctgggcagcgccgtcgtgctccccggagtggaggcggccgagcgcgccggggtgcccgccttcctggagacctccgcgccccgcaacctccccttctacgagcggctcggcttcaccgtcaccgccgacgtcgaggtgcccgaaggaccgcgcacctggtgcatgacccgcaagcccggtgcctga

SEQ ID NO: 22057 - DNA, 2055 bp, Artificial Sequence
  Synthetic Polynucleotide
atggccttaccagtgaccgccttgctcctgccgctggccttgctgctccacgccgccaggccgcagctccagctgcaagagtctggacctggcctggtcaagcctagcgagacactgagcctgacctgtaccgtgtccggcgatagcatcagcagcggcgattactactggggctggatcagacagcctcctggcaaaggactggaatggatcggccacatctactacagcggcgtgacctactacaaccccagcctgaagtccagagtgaccatcagcgtggacaccagccggaaccagttctccctgaagctgtctagcgtgacagccgccgataccgccgtgtactactgcaccagagaggacagcagcaactggcggagtagaggccagggaacactggtcacagttagctctctcgagggctctgaagtgaaaaccgactccaccgaccacgtgaagcccaaagagacagagaacaccaagcagcccagcaagagctgccacaagcccaaggccatcgtgcacaccgagaaagtgaacatgatgagcctgaccgtgctgggcctgcggatgctgttcgccaaaaccgtggccgtgaacttcctgctgaccgccaagctgttcttcctccgcgccaagagaagcggatctggcgtgaagcagaccctgaatttcgacctgctgaagctggctggcgacgtggaatccaacccaggccctactagtatggactggatttggcgcatccttttccttgtcggcgctgctaccggcgcgcattccttcgaagttcagttggtagagtctggaggcggagtggtacaaccggggcggtctcttagacttagttgcgcagcaagcggtttctctttctctggctatgggatgcactgggtgagacaggcccctgggaaaggactggagtgggtggcctacatttcatacgacgggagtaataaatactatgcagactccgttaagggcaggttcacgatctctcgggacaattccaagaatacattgtatcttcagatgaatagtctccgagctgaagacacggcggtttactactgcgctaaagacccggcctggggacttcgacttggagagagttctagctacgattttgacatttggggacaagggacaatggtcactgtctcaagtacgcgtgataaaactcatacctgtccgccatgcccggcaggacgcgccgattgcggctttaccagcgagagctaccagcagggcgtgctgtctgccaccatcctgtacgagatcctgctgggcaaggccaccctgtacgccgtgctggtgtccgccctggtgctgatggctatggtgaagcggaaggacttcagggccaagcgatctggatctggagcaacaaacttctcactactcaaacaagcaggtgacgtggaggagaatcccgggccttctagaggccatatgaccgagtacaagcccacggtgcgcctcgccacccgcgacgacgtccccagggccgtacgcaccctcgccgccgcgttcgccgactaccccgccacgcgccacaccgtcgatccggaccgccacatcgagcgggtcaccgagctgcaagaactcttcctcacgcgcgtcgggctcgacatcggcaaggtgtgggtcgcggacgacggcgccgcggtggcggtctggaccacgccggagagcgtcgaagcgggggcggtgttcgccgagatcggcccgcgcatggccgagttgagcggttcccggctggccgcgcagcaacagatggaaggcctcctggcgccgcaccggcccaaggagcccgcgtggttcctggccaccgtcggcgtctcgcccgaccaccagggcaagggtctgggcagcgccgtcgtgctccccggagtggaggcggccgagcgcgccggggtgcccgccttcctggagacctccgcgccccgcaacctccccttctacgagcggctcggcttcaccgtcaccgccgacgtcgaggtgcccgaaggaccgcgcacctggtgcatgacccgcaagcccggtgcctga

SEQ ID NO: 22058 - DNA, 2613 bp, Artificial Sequence
  Synthetic Polynucleotide
atggccttaccagtgaccgccttgctcctgccgctggccttgctgctccacgccgccaggccgcagctccagctgcaagagtctggacctggcctggtcaagcctagcgagacactgagcctgacctgtaccgtgtccggcgatagcatcagcagcggcgattactactggggctggatcagacagcctcctggcaaaggactggaatggatcggccacatctactacagcggcgtgacctactacaaccccagcctgaagtccagagtgaccatcagcgtggacaccagccggaaccagttctccctgaagctgtctagcgtgacagccgccgataccgccgtgtactactgcaccagagaggacagcagcaactggcggagtagaggccagggaacactggtcacagttagctctctcgaggacctgaagaacgtgttcccacctgaggtggccgtgttcgagcctagcgaggccgagatcagccacacccagaaagccaccctcgtgtgcctggctaccggcttctaccccgaccatgtggaactgtcttggtgggtcaacggcaaagaggtgcacagcggcgtgtgtaccgacccccagccactgaaagaacagcccgccctgaacgacagccggtactgcctgagcagcagactgagagtgtccgccaccttctggcagaacccccggaaccacttcagatgccaggtgcagttctacggcctgagcgagaacgacgagtggacccaggacagagccaagcccgtgacccagatcgtgtctgccgaagcctggggcagagccgattgcggctttaccagcgagagctaccagcagggcgtgctgagcgccaccatcctgtacgagatcctgctgggcaaggccaccctgtacgccgtgctggtgtctgccctggtgctgatggctatggtcaagcggaaggacagccggggaagggccaagcgatctggatctggagcaacaaacttctcactactcaaacaagcaggtgacgtggaggagaatcccgggcctactagtatggactggatttggcgcatccttttccttgtcggcgctgctaccggcgcgcattccttcgaagttcagttggtagagtctggaggcggagtggtacaaccggggcggtctcttagacttagttgcgcagcaagcggtttctctttctctggctatgggatgcactgggtgagacaggcccctgggaaaggactggagtgggtggcctacatttcatacgacgggagtaataaatactatgcagactccgttaagggcaggttcacgatctctcgggacaattccaagaatacattgtatcttcagatgaatagtctccgagctgaagacacggcggtttactactgcgctaaagacccggcctggggacttcgacttggagagagttctagctacgattttgacatttggggacaagggacaatggtcactgtctcaagtacgcgtatccagaaccctgatcctgccgtgtaccagctgcgggatagcaagagcagcgacaagagcgtgtgtctgttcaccgacttcgacagccagaccaacgtgtcccagagcaaggactccgacgtgtacatcaccgataagtgcgtgctggacatgcggagcatggacttcaagagcaactccgccgtggcctggtccaacaagtccgatttcgcctgcgccaacgccttcaacaacagcattatccccgaggacacattcttcccaagccccgagagcagctgcgacgtgaagctggtggaaaagagcttcgagacagacaccaacctgaacttccagaacctgagcgtgatcggcttcagaatcctgctgctgaaagtggccggctttaacctgctgatgaccctgcggctgtggtccagccgcgccaagagaagcggatctggcgtgaagcagaccctgaatttcgacctgctgaagctggctggcgacgtggaatccaacccaggcccttctagaggccatatgaccgagtacaagcccacggtgcgcctcgccacccgcgacgacgtccccagggccgtacgcaccctcgccgccgcgttcgccgactaccccgccacgcgccacaccgtcgatccggaccgccacatcgagcgggtcaccgagctgcaagaactcttcctcacgcgcgtcgggctcgacatcggcaaggtgtgggtcgcggacgacggcgccgcggtggcggtctggaccacgccggagagcgtcgaagcgggggcggtgttcgccgagatcggcccgcgcatggccgagttgagcggttcccggctggccgcgcagcaacagatggaaggcctcctggcgccgcaccggcccaaggagcccgcgtggttcctggccaccgtcggcgtctcgcccgaccaccagggcaagggtctgggcagcgccgtcgtgctccccggagtggaggcggccgagcgcgccggggtgcccgccttcctggagacctccgcgccccgcaacctccccttctacgagcggctcggcttcaccgtcaccgccgacgtcgaggtgcccgaaggaccgcgcacctggtgcatgacccgcaagcccggtgcctga

SEQ ID NO: 22059 - DNA, 2574 bp, Artificial Sequence
  Synthetic Polynucleotide
atggccttaccagtgaccgccttgctcctgccgctggccttgctgctccacgccgccaggccgcagctccagctgcaagagtctggacctggcctggtcaagcctagcgagacactgagcctgacctgtaccgtgtccggcgatagcatcagcagcggcgattactactggggctggatcagacagcctcctggcaaaggactggaatggatcggccacatctactacagcggcgtgacctactacaaccccagcctgaagtccagagtgaccatcagcgtggacaccagccggaaccagttctccctgaagctgtctagcgtgacagccgccgataccgccgtgtactactgcaccagagaggacagcagcaactggcggagtagaggccagggaacactggtcacagttagctctctcgaggacctgaagaacgtgttcccacctgaggtggccgtgttcgagcctagcgaggccgagatcagccacacccagaaagccaccctcgtgtgcctggctaccggcttctaccccgaccatgtggaactgtcttggtgggtcaacggcaaagaggtgcacagcggcgtgtgtaccgacccccagccactgaaagaacagcccgccctgaacgacagccggtactgcctgagcagcagactgagagtgtccgccaccttctggcagaacccccggaaccacttcagatgccaggtgcagttctacggcctgagcgagaacgacgagtggacccaggacagagccaagcccgtgacccagatcgtgtctgccgaagcctggggcagagccgattgcggctttaccagcgagagctaccagcagggcgtgctgagcgccaccatcctgtacgagatcctgctgggcaaggccaccctgtacgccgtgctggtgtctgccctggtgctgatggctatggtcaagcggaaggacagccggggaagggccaagcgatctggatctggagcaacaaacttctcactactcaaacaagcaggtgacgtggaggagaatcccgggcctactagtatggactggatttggcgcatccttttccttgtcggcgctgctaccggcgcgcattccttcgaagaggttcagctgcttgagtctggcggaggactggttcaacctggcggaagcctgagactgtcttgtgccgcttccggcttcagcttcagcagctatgccctgagctgggtccgacaggctcctggcaaaggactggaatgggtgtccagcatcggcgagaatgacggcaccaccgattatgccgatgccgtgaagggcagattcaccatctctcgggacaacagcaagaacaccctgtacctccagatgaacagcctcagagtggaagataccgccgtgtactactgcgtgaaggacggcgttcactggggccagggaacactggttacagtgtctagcacgcgtatccagaaccctgatcctgccgtgtaccagctgcgggatagcaagagcagcgacaagagcgtgtgtctgttcaccgacttcgacagccagaccaacgtgtcccagagcaaggactccgacgtgtacatcaccgataagtgcgtgctggacatgcggagcatggacttcaagagcaactccgccgtggcctggtccaacaagtccgatttcgcctgcgccaacgccttcaacaacagcattatccccgaggacacattcttcccaagccccgagagcagctgcgacgtgaagctggtggaaaagagcttcgagacagacaccaacctgaacttccagaacctgagcgtgatcggcttcagaatcctgctgctgaaagtggccggctttaacctgctgatgaccctgcggctgtggtccagccgcgccaagagaagcggatctggcgtgaagcagaccctgaatttcgacctgctgaagctggctggcgacgtggaatccaacccaggcccttctagaggccatatgaccgagtacaagcccacggtgcgcctcgccacccgcgacgacgtccccagggccgtacgcaccctcgccgccgcgttcgccgactaccccgccacgcgccacaccgtcgatccggaccgccacatcgagcgggtcaccgagctgcaagaactcttcctcacgcgcgtcgggctcgacatcggcaaggtgtgggtcgcggacgacggcgccgcggtggcggtctggaccacgccggagagcgtcgaagcgggggcggtgttcgccgagatcggcccgcgcatggccgagttgagcggttcccggctggccgcgcagcaacagatggaaggcctcctggcgccgcaccggcccaaggagcccgcgtggttcctggccaccgtcggcgtctcgcccgaccaccagggcaagggtctgggcagcgccgtcgtgctccccggagtggaggcggccgagcgcgccggggtgcccgccttcctggagacctccgcgccccgcaacctccccttctacgagcggctcggcttcaccgtcaccgccgacgtcgaggtgcccgaaggaccgcgcacctggtgcatgacccgcaagcccggtgcctga

SEQ ID NO: 22060 - DNA, 2631 bp, Artificial Sequence
  Synthetic Polynucleotide
atggccttaccagtgaccgccttgctcctgccgctggccttgctgctccacgccgccaggccgcagctccagctgcaagagtctggacctggcctggtcaagcctagcgagacactgagcctgacctgtaccgtgtccggcgatagcatcagcagcggcgattactactggggctggatcagacagcctcctggcaaaggactggaatggatcggccacatctactacagcggcgtgacctactacaaccccagcctgaagtccagagtgaccatcagcgtggacaccagccggaaccagttctccctgaagctgtctagcgtgacagccgccgataccgccgtgtactactgcaccagagaggacagcagcaactggcggagtagaggccagggaacactggtcacagttagctctctcgagggctcaggcggaggcggaagtggaggcggaggcagtggcgaggacctgaagaacgtgttcccacctgaggtggccgtgttcgagcctagcgaggccgagatcagccacacccagaaagccaccctcgtgtgcctggctaccggcttctaccccgaccatgtggaactgtcttggtgggtcaacggcaaagaggtgcacagcggcgtgtgtaccgacccccagccactgaaagaacagcccgccctgaacgacagccggtactgcctgagcagcagactgagagtgtccgccaccttctggcagaacccccggaaccacttcagatgccaggtgcagttctacggcctgagcgagaacgacgagtggacccaggacagagccaagcccgtgacccagatcgtgtctgccgaagcctggggcagagccgattgcggctttaccagcgagagctaccagcagggcgtgctgagcgccaccatcctgtacgagatcctgctgggcaaggccaccctgtacgccgtgctggtgtctgccctggtgctgatggctatggtcaagcggaaggacagccggggaagggccaagcgatctggatctggagcaacaaacttctcactactcaaacaagcaggtgacgtggaggagaatcccgggcctactagtatggactggatttggcgcatccttttccttgtcggcgctgctaccggcgcgcattccttcgaagtgcagctgcttgaaagtggcggcggactgattcagcctggcggatctctgagactgagctgtgccgccagcggcttcaccttttctagccacgccatgacctgggtccgacaggcacctggaaaagggcttgaatgggtgtccgccatcagcggctctggcgattacacacactacgccgacagcgtgaagggcagattcaccatcagcagagacaacagcaagaacaccgtgtacctccagatgaacagcctgagagccgaggacagcgccgtgtattattgcgccaaggatgaggatggcggcagcctgcttggacacagaggacaaggcaccctggtcaccgtttcttccacgcgtatccagaaccctgatcctgccgtgtaccagctgcgggatagcaagagcagcgacaagagcgtgtgtctgttcaccgacttcgacagccagaccaacgtgtcccagagcaaggactccgacgtgtacatcaccgataagtgcgtgctggacatgcggagcatggacttcaagagcaactccgccgtggcctggtccaacaagtccgatttcgcctgcgccaacgccttcaacaacagcattatccccgaggacacattcttcccaagccccgagagcagctgcgacgtgaagctggtggaaaagagcttcgagacagacaccaacctgaacttccagaacctgagcgtgatcggcttcagaatcctgctgctgaaagtggccggctttaacctgctgatgaccctgcggctgtggtccagccgcgccaagagaagcggatctggcgtgaagcagaccctgaatttcgacctgctgaagctggctggcgacgtggaatccaacccaggcccttctagaggccatatgaccgagtacaagcccacggtgcgcctcgccacccgcgacgacgtccccagggccgtacgcaccctcgccgccgcgttcgccgactaccccgccacgcgccacaccgtcgatccggaccgccacatcgagcgggtcaccgagctgcaagaactcttcctcacgcgcgtcgggctcgacatcggcaaggtgtgggtcgcggacgacggcgccgcggtggcggtctggaccacgccggagagcgtcgaagcgggggcggtgttcgccgagatcggcccgcgcatggccgagttgagcggttcccggctggccgcgcagcaacagatggaaggcctcctggcgccgcaccggcccaaggagcccgcgtggttcctggccaccgtcggcgtctcgcccgaccaccagggcaagggtctgggcagcgccgtcgtgctccccggagtggaggcggccgagcgcgccggggtgcccgccttcctggagacctccgcgccccgcaacctccccttctacgagcggctcggcttcaccgtcaccgccgacgtcgaggtgcccgaaggaccgcgcacctggtgcatgacccgcaagcccggtgcctga

SEQ ID NO: 22061 - DNA, 2640 bp, Artificial Sequence
  Synthetic Polynucleotide
atggccttaccagtgaccgccttgctcctgccgctggccttgctgctccacgccgccaggccgcaggtgcagctggttgaatctggcggaggactggttcagcctggcggatctctgagactgtcttgtgccgccagcggcttcaccttcaccaatcacgccatgagctgggtccgacaggcccctggaaaaggactggaactggtgtctagcatcagcggcaacggcagaaccacctactacgccgatagcgtgaagggcagattcaccatcagccgggacatcagcaagaacaccctggacctccagatgaacagcctgagagccgaggataccgccgtgtactactgtgccaaggatggcggagagacactggtggatagcagaggccagggcacactggtcacagtgtcatctctcgagggctcaggcggaggcggaagtggaggcggaggcagtggcgaggacctgaagaacgtgttcccacctgaggtggccgtgttcgagcctagcgaggccgagatcagccacacccagaaagccaccctcgtgtgcctggctaccggcttctaccccgaccatgtggaactgtcttggtgggtcaacggcaaagaggtgcacagcggcgtgtgtaccgacccccagccactgaaagaacagcccgccctgaacgacagccggtactgcctgagcagcagactgagagtgtccgccaccttctggcagaacccccggaaccacttcagatgccaggtgcagttctacggcctgagcgagaacgacgagtggacccaggacagagccaagcccgtgacccagatcgtgtctgccgaagcctggggcagagccgattgcggctttaccagcgagagctaccagcagggcgtgctgagcgccaccatcctgtacgagatcctgctgggcaaggccaccctgtacgccgtgctggtgtctgccctggtgctgatggctatggtcaagcggaaggacagccggggaagggccaagcgatctggatctggagcaacaaacttctcactactcaaacaagcaggtgacgtggaggagaatcccgggcctactagtatggactggatttggcgcatccttttccttgtcggcgctgctaccggcgcgcattccttcgaagaggttcagctgcttgagtctggcggaggactggttcaacctggcggaagcctgagactgtcttgtgccgccagcggcttcacctttagcagctacgccatgagctgggtccgacaggctcctggcaaaggactggaatgggtgtccagcatcagcggcagcggcgactacatctactacgccgatagcgtgaagggcagattcaccatcagccgggacatcagcaagaacaccctgtacctccagatgaacagcctgagagccgaggacaccgccgtgtactactgtgccaaagaaggcaccggcgctaacagcagcctggccgattatagaggccagggcacactggtcaccgtgtctagtacgcgtatccagaaccctgatcctgccgtgtaccagctgcgggatagcaagagcagcgacaagagcgtgtgtctgttcaccgacttcgacagccagaccaacgtgtcccagagcaaggactccgacgtgtacatcaccgataagtgcgtgctggacatgcggagcatggacttcaagagcaactccgccgtggcctggtccaacaagtccgatttcgcctgcgccaacgccttcaacaacagcattatccccgaggacacattcttcccaagccccgagagcagctgcgacgtgaagctggtggaaaagagcttcgagacagacaccaacctgaacttccagaacctgagcgtgatcggcttcagaatcctgctgctgaaagtggccggctttaacctgctgatgaccctgcggctgtggtccagccgcgccaagagaagcggatctggcgtgaagcagaccctgaatttcgacctgctgaagctggctggcgacgtggaatccaacccaggcccttctagaggccatatgaccgagtacaagcccacggtgcgcctcgccacccgcgacgacgtccccagggccgtacgcaccctcgccgccgcgttcgccgactaccccgccacgcgccacaccgtcgatccggaccgccacatcgagcgggtcaccgagctgcaagaactcttcctcacgcgcgtcgggctcgacatcggcaaggtgtgggtcgcggacgacggcgccgcggtggcggtctggaccacgccggagagcgtcgaagcgggggcggtgttcgccgagatcggcccgcgcatggccgagttgagcggttcccggctggccgcgcagcaacagatggaaggcctcctggcgccgcaccggcccaaggagcccgcgtggttcctggccaccgtcggcgtctcgcccgaccaccagggcaagggtctgggcagcgccgtcgtgctccccggagtggaggcggccgagcgcgccggggtgcccgccttcctggagacctccgcgccccgcaacctccccttctacgagcggctcggcttcaccgtcaccgccgacgtcgaggtgcccgaaggaccgcgcacctggtgcatgacccgcaagcccggtgcctga

SEQ ID NO: 22062 - DNA, 2619 bp, Artificial Sequence
  Synthetic Polynucleotide
atggccttaccagtgaccgccttgctcctgccgctggccttgctgctccacgccgccaggccgcaggtgcagctggttgaatctggcggaggactggttcagcctggcggatctctgagactgtcttgtgccgccagcggcttcaccttcaccaatcacgccatgagctgggtccgacaggcccctggaaaaggactggaactggtgtctagcatcagcggcaacggcagaaccacctactacgccgatagcgtgaagggcagattcaccatcagccgggacatcagcaagaacaccctggacctccagatgaacagcctgagagccgaggataccgccgtgtactactgtgccaaggatggcggagagacactggtggatagcagaggccagggcacactggtcacagtgtcatctctcgaggttgcggcgctcgaaagggaggacctgaagaacgtgttcccacctgaggtggccgtgttcgagcctagcgaggccgagatcagccacacccagaaagccaccctcgtgtgcctggctaccggcttctaccccgaccatgtggaactgtcttggtgggtcaacggcaaagaggtgcacagcggcgtgtgtaccgacccccagccactgaaagaacagcccgccctgaacgacagccggtactgcctgagcagcagactgagagtgtccgccaccttctggcagaacccccggaaccacttcagatgccaggtgcagttctacggcctgagcgagaacgacgagtggacccaggacagagccaagcccgtgacccagatcgtgtctgccgaagcctggggcagagccgattgcggctttaccagcgagagctaccagcagggcgtgctgagcgccaccatcctgtacgagatcctgctgggcaaggccaccctgtacgccgtgctggtgtctgccctggtgctgatggctatggtcaagcggaaggacagccggggaagggccaagcgatctggatctggagcaacaaacttctcactactcaaacaagcaggtgacgtggaggagaatcccgggcctactagtatggactggatttggcgcatccttttccttgtcggcgctgctaccggcgcgcattccttcgaagaggttcagctgcttgagtctggcggaggactggttcaacctggcggaagcctgagactgtcttgtgccgccagcggcttcacctttagcagctacgccatgagctgggtccgacaggctcctggcaaaggactggaatgggtgtccagcatcagcggcagcggcgactacatctactacgccgatagcgtgaagggcagattcaccatcagccgggacatcagcaagaacaccctgtacctccagatgaacagcctgagagccgaggacaccgccgtgtactactgtgccaaagaaggcaccggcgctaacagcagcctggccgattatagaggccagggcacactggtcaccgtgtctagtacgcgtatccagaaccctgatcctgccgtgtaccagctgcgggatagcaagagcagcgacaagagcgtgtgtctgttcaccgacttcgacagccagaccaacgtgtcccagagcaaggactccgacgtgtacatcaccgataagtgcgtgctggacatgcggagcatggacttcaagagcaactccgccgtggcctggtccaacaagtccgatttcgcctgcgccaacgccttcaacaacagcattatccccgaggacacattcttcccaagccccgagagcagctgcgacgtgaagctggtggaaaagagcttcgagacagacaccaacctgaacttccagaacctgagcgtgatcggcttcagaatcctgctgctgaaagtggccggctttaacctgctgatgaccctgcggctgtggtccagccgcgccaagagaagcggatctggcgtgaagcagaccctgaatttcgacctgctgaagctggctggcgacgtggaatccaacccaggcccttctagaggccatatgaccgagtacaagcccacggtgcgcctcgccacccgcgacgacgtccccagggccgtacgcaccctcgccgccgcgttcgccgactaccccgccacgcgccacaccgtcgatccggaccgccacatcgagcgggtcaccgagctgcaagaactcttcctcacgcgcgtcgggctcgacatcggcaaggtgtgggtcgcggacgacggcgccgcggtggcggtctggaccacgccggagagcgtcgaagcgggggcggtgttcgccgagatcggcccgcgcatggccgagttgagcggttcccggctggccgcgcagcaacagatggaaggcctcctggcgccgcaccggcccaaggagcccgcgtggttcctggccaccgtcggcgtctcgcccgaccaccagggcaagggtctgggcagcgccgtcgtgctccccggagtggaggcggccgagcgcgccggggtgcccgccttcctggagacctccgcgccccgcaacctccccttctacgagcggctcggcttcaccgtcaccgccgacgtcgaggtgcccgaaggaccgcgcacctggtgcatgacccgcaagcccggtgcctga

SEQ ID NO: 22063 - DNA, 2613 bp, Artificial Sequence
  Synthetic Polynucleotide
atggccttaccagtgaccgccttgctcctgccgctggccttgctgctccacgccgccaggccgcaggtgcagctggttgaatctggcggaggactggttcagcctggcggatctctgagactgtcttgtgccgccagcggcttcaccttcaccaatcacgccatgagctgggtccgacaggcccctggaaaaggactggaactggtgtctagcatcagcggcaacggcagaaccacctactacgccgatagcgtgaagggcagattcaccatcagccgggacatcagcaagaacaccctggacctccagatgaacagcctgagagccgaggataccgccgtgtactactgtgccaaggatggcggagagacactggtggatagcagaggccagggcacactggtcacagtgtcatctctcgaggccgcagcaaaggaggacctgaagaacgtgttcccacctgaggtggccgtgttcgagcctagcgaggccgagatcagccacacccagaaagccaccctcgtgtgcctggctaccggcttctaccccgaccatgtggaactgtcttggtgggtcaacggcaaagaggtgcacagcggcgtgtgtaccgacccccagccactgaaagaacagcccgccctgaacgacagccggtactgcctgagcagcagactgagagtgtccgccaccttctggcagaacccccggaaccacttcagatgccaggtgcagttctacggcctgagcgagaacgacgagtggacccaggacagagccaagcccgtgacccagatcgtgtctgccgaagcctggggcagagccgattgcggctttaccagcgagagctaccagcagggcgtgctgagcgccaccatcctgtacgagatcctgctgggcaaggccaccctgtacgccgtgctggtgtctgccctggtgctgatggctatggtcaagcggaaggacagccggggaagggccaagcgatctggatctggagcaacaaacttctcactactcaaacaagcaggtgacgtggaggagaatcccgggcctactagtatggactggatttggcgcatccttttccttgtcggcgctgctaccggcgcgcattccttcgaagaggttcagctgcttgagtctggcggaggactggttcaacctggcggaagcctgagactgtcttgtgccgccagcggcttcacctttagcagctacgccatgagctgggtccgacaggctcctggcaaaggactggaatgggtgtccagcatcagcggcagcggcgactacatctactacgccgatagcgtgaagggcagattcaccatcagccgggacatcagcaagaacaccctgtacctccagatgaacagcctgagagccgaggacaccgccgtgtactactgtgccaaagaaggcaccggcgctaacagcagcctggccgattatagaggccagggcacactggtcaccgtgtctagtacgcgtatccagaaccctgatcctgccgtgtaccagctgcgggatagcaagagcagcgacaagagcgtgtgtctgttcaccgacttcgacagccagaccaacgtgtcccagagcaaggactccgacgtgtacatcaccgataagtgcgtgctggacatgcggagcatggacttcaagagcaactccgccgtggcctggtccaacaagtccgatttcgcctgcgccaacgccttcaacaacagcattatccccgaggacacattcttcccaagccccgagagcagctgcgacgtgaagctggtggaaaagagcttcgagacagacaccaacctgaacttccagaacctgagcgtgatcggcttcagaatcctgctgctgaaagtggccggctttaacctgctgatgaccctgcggctgtggtccagccgcgccaagagaagcggatctggcgtgaagcagaccctgaatttcgacctgctgaagctggctggcgacgtggaatccaacccaggcccttctagaggccatatgaccgagtacaagcccacggtgcgcctcgccacccgcgacgacgtccccagggccgtacgcaccctcgccgccgcgttcgccgactaccccgccacgcgccacaccgtcgatccggaccgccacatcgagcgggtcaccgagctgcaagaactcttcctcacgcgcgtcgggctcgacatcggcaaggtgtgggtcgcggacgacggcgccgcggtggcggtctggaccacgccggagagcgtcgaagcgggggcggtgttcgccgagatcggcccgcgcatggccgagttgagcggttcccggctggccgcgcagcaacagatggaaggcctcctggcgccgcaccggcccaaggagcccgcgtggttcctggccaccgtcggcgtctcgcccgaccaccagggcaagggtctgggcagcgccgtcgtgctccccggagtggaggcggccgagcgcgccggggtgcccgccttcctggagacctccgcgccccgcaacctccccttctacgagcggctcggcttcaccgtcaccgccgacgtcgaggtgcccgaaggaccgcgcacctggtgcatgacccgcaagcccggtgcctga

SEQ ID NO: 22064 - DNA, 2649 bp, Artificial Sequence
  Synthetic Polynucleotide
atggccttaccagtgaccgccttgctcctgccgctggccttgctgctccacgccgccaggccgcaggtgcagctggttgaatctggcggaggactggttcagcctggcggatctctgagactgtcttgtgccgccagcggcttcaccttcaccaatcacgccatgagctgggtccgacaggcccctggaaaaggactggaactggtgtctagcatcagcggcaacggcagaaccacctactacgccgatagcgtgaagggcagattcaccatcagccgggacatcagcaagaacaccctggacctccagatgaacagcctgagagccgaggataccgccgtgtactactgtgccaaggatggcggagagacactggtggatagcagaggccagggcacactggtcacagtgtcatctctcgagggcggaggcggaagtggaggcggaggatctggcggcggaggctctgtcgaggacctgaagaacgtgttcccacctgaggtggccgtgttcgagcctagcaaggccgagatcgcccacacccagaaagccaccctcgtgtgcctggctaccggcttctaccccgaccatgtggaactgtcttggtgggtcaacggcaaagaggtgcacagcggcgtgtgtaccgacccccagccactgaaagaacagcccgccctgaacgacagccggtactgcctgagcagcagactgagagtgtccgccaccttctggcagaacccccggaaccacttcagatgccaggtgcagttctacggcctgagcgagaacgacgagtggacccaggacagagccaagcccgtgacccagatcgtgtctgccgaagcctggggcagagccgattgcggcatcaccagcgccagctaccaccagggcgtgctgagcgccaccatcctgtacgagatcctgctgggcaaggccaccctgtacgccgtgctggtgtctgccctggtgctgatggctatggtcaagcggaaggacagccggggaagggccaagcgatctggatctggagcaacaaacttctcactactcaaacaagcaggtgacgtggaggagaatcccgggcctactagtatggactggatttggcgcatccttttccttgtcggcgctgctaccggcgcgcattccttcgaagaggttcagctgcttgagtctggcggaggactggttcaacctggcggaagcctgagactgtcttgtgccgccagcggcttcacctttagcagctacgccatgagctgggtccgacaggctcctggcaaaggactggaatgggtgtccagcatcagcggcagcggcgactacatctactacgccgatagcgtgaagggcagattcaccatcagccgggacatcagcaagaacaccctgtacctccagatgaacagcctgagagccgaggacaccgccgtgtactactgtgccaaagaaggcaccggcgctaacagcagcctggccgattatagaggccagggcacactggtcaccgtgtctagtacgcgtatccagaaccctgatcctgccgtgtaccagctgcgggatagcaagagcagcgacaagagcgtgtgtctgttcaccgacttcgacagccagaccaacgtgtcccagagcaaggactccgacgtgtacatcaccgataagtgcgtgctggacatgcggagcatggacttcaagagcaactccgccgtggcctggtccaacaagtccgatttcgcctgcgccaacgccttcaacaacagcattatccccgaggacacattcttcccaagccccgagagcagctgcgacgtgaagctggtggaaaagagcttcgagacagacaccaacctgaacttccagaacctgagcgtgatcggcttcagaatcctgctgctgaaagtggccggctttaacctgctgatgaccctgcggctgtggtccagccgcgccaagagaagcggatctggcgtgaagcagaccctgaatttcgacctgctgaagctggctggcgacgtggaatccaacccaggcccttctagaggccatatgaccgagtacaagcccacggtgcgcctcgccacccgcgacgacgtccccagggccgtacgcaccctcgccgccgcgttcgccgactaccccgccacgcgccacaccgtcgatccggaccgccacatcgagcgggtcaccgagctgcaagaactcttcctcacgcgcgtcgggctcgacatcggcaaggtgtgggtcgcggacgacggcgccgcggtggcggtctggaccacgccggagagcgtcgaagcgggggcggtgttcgccgagatcggcccgcgcatggccgagttgagcggttcccggctggccgcgcagcaacagatggaaggcctcctggcgccgcaccggcccaaggagcccgcgtggttcctggccaccgtcggcgtctcgcccgaccaccagggcaagggtctgggcagcgccgtcgtgctccccggagtggaggcggccgagcgcgccggggtgcccgccttcctggagacctccgcgccccgcaacctccccttctacgagcggctcggcttcaccgtcaccgccgacgtcgaggtgcccgaaggaccgcgcacctggtgcatgacccgcaagcccggtgcctga

SEQ ID NO: 22065 - DNA, 2544 bp, Artificial Sequence
  Synthetic Polynucleotide
atggccttaccagtgaccgccttgctcctgccgctggccttgctgctccacgccgccaggccgcaggtgcagctggttgaatctggcggaggactggttcagcctggcggatctctgagactgtcttgtgccgccagcggcttcaccttcaccaatcacgccatgagctgggtccgacaggcccctggaaaaggactggaactggtgtctagcatcagcggcaacggcagaaccacctactacgccgatagcgtgaagggcagattcaccatcagccgggacatcagcaagaacaccctggacctccagatgaacagcctgagagccgaggataccgccgtgtactactgtgccaaggatggcggagagacactggtggatagcagaggccagggcacactggtcacagtgtcatctctcgagggcggaggcggaagtggaggcggaggatctggcggcggaggctctgtcgagatccagaaccctgatcctgccgtgtaccagctgcgggatagcaagagcagcgacaagagcgtgtgtctgttcaccgacttcgacagccagaccaacgtgtcccagagcaaggactccgacgtgtacatcaccgataagtgcgtgctggacatgcggagcatggacttcaagagcaactccgccgtggcctggtccaacaagtccgatttcgcctgcgccaacgccttcaacaacagcattatccccgaggacacattcttcccaagccccgagagcagctgcgacgtgaagctggtggaaaagagcttcgagacagacaccaacctgaacttccagaacctgagcgtgatcggcttcagaatcctgctgctgaaagtggccggctttaacctgctgatgaccctgcggctgtggtccagccgcgccaagagaagcggatctggcgtgaagcagaccctgaatttcgacctgctgaagctggctggcgacgtggaatccaacccaggccctactagtatggactggatttggcgcatccttttccttgtcggcgctgctaccggcgcgcattccttcgaagaggttcagctgcttgagtctggcggaggactggttcaacctggcggaagcctgagactgtcttgtgccgccagcggcttcacctttagcagctacgccatgagctgggtccgacaggctcctggcaaaggactggaatgggtgtccagcatcagcggcagcggcgactacatctactacgccgatagcgtgaagggcagattcaccatcagccgggacatcagcaagaacaccctgtacctccagatgaacagcctgagagccgaggacaccgccgtgtactactgtgccaaagaaggcaccggcgctaacagcagcctggccgattatagaggccagggcacactggtcaccgtgtctagtacgcgtatccagaaccctgatcctgccgtgtaccagctgcgggatagcaagagcagcgacaagagcgtgtgtctgttcaccgacttcgacagccagaccaacgtgtcccagagcaaggactccgacgtgtacatcaccgataagtgcgtgctggacatgcggagcatggacttcaagagcaactccgccgtggcctggtccaacaagtccgatttcgcctgcgccaacgccttcaacaacagcattatccccgaggacacattcttcccaagccccgagagcagctgcgacgtgaagctggtggaaaagagcttcgagacagacaccaacctgaacttccagaacctgagcgtgatcggcttcagaatcctgctgctgaaagtggccggctttaacctgctgatgaccctgcggctgtggtccagccgcgccaagagaagcggatctggcgtgaagcagaccctgaatttcgacctgctgaagctggctggcgacgtggaatccaacccaggcccttctagaggccatatgaccgagtacaagcccacggtgcgcctcgccacccgcgacgacgtccccagggccgtacgcaccctcgccgccgcgttcgccgactaccccgccacgcgccacaccgtcgatccggaccgccacatcgagcgggtcaccgagctgcaagaactcttcctcacgcgcgtcgggctcgacatcggcaaggtgtgggtcgcggacgacggcgccgcggtggcggtctggaccacgccggagagcgtcgaagcgggggcggtgttcgccgagatcggcccgcgcatggccgagttgagcggttcccggctggccgcgcagcaacagatggaaggcctcctggcgccgcaccggcccaaggagcccgcgtggttcctggccaccgtcggcgtctcgcccgaccaccagggcaagggtctgggcagcgccgtcgtgctccccggagtggaggcggccgagcgcgccggggtgcccgccttcctggagacctccgcgccccgcaacctccccttctacgagcggctcggcttcaccgtcaccgccgacgtcgaggtgcccgaaggaccgcgcacctggtgcatgacccgcaagcccggtgcctga

SEQ ID NO: 22066 - DNA, 2610 bp, Artificial Sequence
  Synthetic Polynucleotide
atggccttaccagtgaccgccttgctcctgccgctggccttgctgctccacgccgccaggccgcagctccagctgcaagagtctggacctggcctggtcaagcctagcgagacactgagcctgacctgtaccgtgtccggcgatagcatcagcagcggcgattactactggggctggatcagacagcctcctggcaaaggactggaatggatcggccacatctactacagcggcgtgacctactacaaccccagcctgaagtccagagtgaccatcagcgtggacaccagccggaaccagttctccctgaagctgtctagcgtgacagccgccgataccgccgtgtactactgcaccagagaggacagcagcaactggcggagtagaggccagggaacactggtcacagttagctctctcgaggttgcggcgctcgaaagggaggacctgaagaacgtgttcccacctgaggtggccgtgttcgagcctagcgaggccgagatcagccacacccagaaagccaccctcgtgtgcctggctaccggcttctaccccgaccatgtggaactgtcttggtgggtcaacggcaaagaggtgcacagcggcgtgtgtaccgacccccagccactgaaagaacagcccgccctgaacgacagccggtactgcctgagcagcagactgagagtgtccgccaccttctggcagaacccccggaaccacttcagatgccaggtgcagttctacggcctgagcgagaacgacgagtggacccaggacagagccaagcccgtgacccagatcgtgtctgccgaagcctggggcagagccgattgcggctttaccagcgagagctaccagcagggcgtgctgagcgccaccatcctgtacgagatcctgctgggcaaggccaccctgtacgccgtgctggtgtctgccctggtgctgatggctatggtcaagcggaaggacagccggggaagggccaagcgatctggatctggagcaacaaacttctcactactcaaacaagcaggtgacgtggaggagaatcccgggcctactagtatggactggatttggcgcatccttttccttgtcggcgctgctaccggcgcgcattccttcgaagtgcagctgcttgaaagtggcggcggactgattcagcctggcggatctctgagactgagctgtgccgccagcggcttcaccttttctagccacgccatgacctgggtccgacaggcacctggaaaagggcttgaatgggtgtccgccatcagcggctctggcgattacacacactacgccgacagcgtgaagggcagattcaccatcagcagagacaacagcaagaacaccgtgtacctccagatgaacagcctgagagccgaggacagcgccgtgtattattgcgccaaggatgaggatggcggcagcctgcttggacacagaggacaaggcaccctggtcaccgtttcttccacgcgtatccagaaccctgatcctgccgtgtaccagctgcgggatagcaagagcagcgacaagagcgtgtgtctgttcaccgacttcgacagccagaccaacgtgtcccagagcaaggactccgacgtgtacatcaccgataagtgcgtgctggacatgcggagcatggacttcaagagcaactccgccgtggcctggtccaacaagtccgatttcgcctgcgccaacgccttcaacaacagcattatccccgaggacacattcttcccaagccccgagagcagctgcgacgtgaagctggtggaaaagagcttcgagacagacaccaacctgaacttccagaacctgagcgtgatcggcttcagaatcctgctgctgaaagtggccggctttaacctgctgatgaccctgcggctgtggtccagccgcgccaagagaagcggatctggcgtgaagcagaccctgaatttcgacctgctgaagctggctggcgacgtggaatccaacccaggcccttctagaggccatatgaccgagtacaagcccacggtgcgcctcgccacccgcgacgacgtccccagggccgtacgcaccctcgccgccgcgttcgccgactaccccgccacgcgccacaccgtcgatccggaccgccacatcgagcgggtcaccgagctgcaagaactcttcctcacgcgcgtcgggctcgacatcggcaaggtgtgggtcgcggacgacggcgccgcggtggcggtctggaccacgccggagagcgtcgaagcgggggcggtgttcgccgagatcggcccgcgcatggccgagttgagcggttcccggctggccgcgcagcaacagatggaaggcctcctggcgccgcaccggcccaaggagcccgcgtggttcctggccaccgtcggcgtctcgcccgaccaccagggcaagggtctgggcagcgccgtcgtgctccccggagtggaggcggccgagcgcgccggggtgcccgccttcctggagacctccgcgccccgcaacctccccttctacgagcggctcggcttcaccgtcaccgccgacgtcgaggtgcccgaaggaccgcgcacctggtgcatgacccgcaagcccggtgcctga

SEQ ID NO: 22067 - DNA, 2604 bp, Artificial Sequence
  Synthetic Polynucleotide
atggccttaccagtgaccgccttgctcctgccgctggccttgctgctccacgccgccaggccgcagctccagctgcaagagtctggacctggcctggtcaagcctagcgagacactgagcctgacctgtaccgtgtccggcgatagcatcagcagcggcgattactactggggctggatcagacagcctcctggcaaaggactggaatggatcggccacatctactacagcggcgtgacctactacaaccccagcctgaagtccagagtgaccatcagcgtggacaccagccggaaccagttctccctgaagctgtctagcgtgacagccgccgataccgccgtgtactactgcaccagagaggacagcagcaactggcggagtagaggccagggaacactggtcacagttagctctctcgaggccgcagcaaaggaggacctgaagaacgtgttcccacctgaggtggccgtgttcgagcctagcgaggccgagatcagccacacccagaaagccaccctcgtgtgcctggctaccggcttctaccccgaccatgtggaactgtcttggtgggtcaacggcaaagaggtgcacagcggcgtgtgtaccgacccccagccactgaaagaacagcccgccctgaacgacagccggtactgcctgagcagcagactgagagtgtccgccaccttctggcagaacccccggaaccacttcagatgccaggtgcagttctacggcctgagcgagaacgacgagtggacccaggacagagccaagcccgtgacccagatcgtgtctgccgaagcctggggcagagccgattgcggctttaccagcgagagctaccagcagggcgtgctgagcgccaccatcctgtacgagatcctgctgggcaaggccaccctgtacgccgtgctggtgtctgccctggtgctgatggctatggtcaagcggaaggacagccggggaagggccaagcgatctggatctggagcaacaaacttctcactactcaaacaagcaggtgacgtggaggagaatcccgggcctactagtatggactggatttggcgcatccttttccttgtcggcgctgctaccggcgcgcattccttcgaagtgcagctgcttgaaagtggcggcggactgattcagcctggcggatctctgagactgagctgtgccgccagcggcttcaccttttctagccacgccatgacctgggtccgacaggcacctggaaaagggcttgaatgggtgtccgccatcagcggctctggcgattacacacactacgccgacagcgtgaagggcagattcaccatcagcagagacaacagcaagaacaccgtgtacctccagatgaacagcctgagagccgaggacagcgccgtgtattattgcgccaaggatgaggatggcggcagcctgcttggacacagaggacaaggcaccctggtcaccgtttcttccacgcgtatccagaaccctgatcctgccgtgtaccagctgcgggatagcaagagcagcgacaagagcgtgtgtctgttcaccgacttcgacagccagaccaacgtgtcccagagcaaggactccgacgtgtacatcaccgataagtgcgtgctggacatgcggagcatggacttcaagagcaactccgccgtggcctggtccaacaagtccgatttcgcctgcgccaacgccttcaacaacagcattatccccgaggacacattcttcccaagccccgagagcagctgcgacgtgaagctggtggaaaagagcttcgagacagacaccaacctgaacttccagaacctgagcgtgatcggcttcagaatcctgctgctgaaagtggccggctttaacctgctgatgaccctgcggctgtggtccagccgcgccaagagaagcggatctggcgtgaagcagaccctgaatttcgacctgctgaagctggctggcgacgtggaatccaacccaggcccttctagaggccatatgaccgagtacaagcccacggtgcgcctcgccacccgcgacgacgtccccagggccgtacgcaccctcgccgccgcgttcgccgactaccccgccacgcgccacaccgtcgatccggaccgccacatcgagcgggtcaccgagctgcaagaactcttcctcacgcgcgtcgggctcgacatcggcaaggtgtgggtcgcggacgacggcgccgcggtggcggtctggaccacgccggagagcgtcgaagcgggggcggtgttcgccgagatcggcccgcgcatggccgagttgagcggttcccggctggccgcgcagcaacagatggaaggcctcctggcgccgcaccggcccaaggagcccgcgtggttcctggccaccgtcggcgtctcgcccgaccaccagggcaagggtctgggcagcgccgtcgtgctccccggagtggaggcggccgagcgcgccggggtgcccgccttcctggagacctccgcgccccgcaacctccccttctacgagcggctcggcttcaccgtcaccgccgacgtcgaggtgcccgaaggaccgcgcacctggtgcatgacccgcaagcccggtgcctga

SEQ ID NO: 22068 - DNA, 2640 bp, Artificial Sequence
  Synthetic Polynucleotide
atggccttaccagtgaccgccttgctcctgccgctggccttgctgctccacgccgccaggccgcagctccagctgcaagagtctggacctggcctggtcaagcctagcgagacactgagcctgacctgtaccgtgtccggcgatagcatcagcagcggcgattactactggggctggatcagacagcctcctggcaaaggactggaatggatcggccacatctactacagcggcgtgacctactacaaccccagcctgaagtccagagtgaccatcagcgtggacaccagccggaaccagttctccctgaagctgtctagcgtgacagccgccgataccgccgtgtactactgcaccagagaggacagcagcaactggcggagtagaggccagggaacactggtcacagttagctctctcgagggcggaggcggaagtggaggcggaggatctggcggcggaggctctgtcgaggacctgaagaacgtgttcccacctgaggtggccgtgttcgagcctagcaaggccgagatcgcccacacccagaaagccaccctcgtgtgcctggctaccggcttctaccccgaccatgtggaactgtcttggtgggtcaacggcaaagaggtgcacagcggcgtgtgtaccgacccccagccactgaaagaacagcccgccctgaacgacagccggtactgcctgagcagcagactgagagtgtccgccaccttctggcagaacccccggaaccacttcagatgccaggtgcagttctacggcctgagcgagaacgacgagtggacccaggacagagccaagcccgtgacccagatcgtgtctgccgaagcctggggcagagccgattgcggcatcaccagcgccagctaccaccagggcgtgctgagcgccaccatcctgtacgagatcctgctgggcaaggccaccctgtacgccgtgctggtgtctgccctggtgctgatggctatggtcaagcggaaggacagccggggaagggccaagcgatctggatctggagcaacaaacttctcactactcaaacaagcaggtgacgtggaggagaatcccgggcctactagtatggactggatttggcgcatccttttccttgtcggcgctgctaccggcgcgcattccttcgaagtgcagctgcttgaaagtggcggcggactgattcagcctggcggatctctgagactgagctgtgccgccagcggcttcaccttttctagccacgccatgacctgggtccgacaggcacctggaaaagggcttgaatgggtgtccgccatcagcggctctggcgattacacacactacgccgacagcgtgaagggcagattcaccatcagcagagacaacagcaagaacaccgtgtacctccagatgaacagcctgagagccgaggacagcgccgtgtattattgcgccaaggatgaggatggcggcagcctgcttggacacagaggacaaggcaccctggtcaccgtttcttccacgcgtatccagaaccctgatcctgccgtgtaccagctgcgggatagcaagagcagcgacaagagcgtgtgtctgttcaccgacttcgacagccagaccaacgtgtcccagagcaaggactccgacgtgtacatcaccgataagtgcgtgctggacatgcggagcatggacttcaagagcaactccgccgtggcctggtccaacaagtccgatttcgcctgcgccaacgccttcaacaacagcattatccccgaggacacattcttcccaagccccgagagcagctgcgacgtgaagctggtggaaaagagcttcgagacagacaccaacctgaacttccagaacctgagcgtgatcggcttcagaatcctgctgctgaaagtggccggctttaacctgctgatgaccctgcggctgtggtccagccgcgccaagagaagcggatctggcgtgaagcagaccctgaatttcgacctgctgaagctggctggcgacgtggaatccaacccaggcccttctagaggccatatgaccgagtacaagcccacggtgcgcctcgccacccgcgacgacgtccccagggccgtacgcaccctcgccgccgcgttcgccgactaccccgccacgcgccacaccgtcgatccggaccgccacatcgagcgggtcaccgagctgcaagaactcttcctcacgcgcgtcgggctcgacatcggcaaggtgtgggtcgcggacgacggcgccgcggtggcggtctggaccacgccggagagcgtcgaagcgggggcggtgttcgccgagatcggcccgcgcatggccgagttgagcggttcccggctggccgcgcagcaacagatggaaggcctcctggcgccgcaccggcccaaggagcccgcgtggttcctggccaccgtcggcgtctcgcccgaccaccagggcaagggtctgggcagcgccgtcgtgctccccggagtggaggcggccgagcgcgccggggtgcccgccttcctggagacctccgcgccccgcaacctccccttctacgagcggctcggcttcaccgtcaccgccgacgtcgaggtgcccgaaggaccgcgcacctggtgcatgacccgcaagcccggtgcctga

SEQ ID NO: 22069 - DNA, 2541 bp, Artificial Sequence
  Synthetic Polynucleotide
atggccttaccagtgaccgccttgctcctgccgctggccttgctgctccacgccgccaggccgcagctccagctgcaagagtctggacctggcctggtcaagcctagcgagacactgagcctgacctgtaccgtgtccggcgatagcatcagcagcggcgattactactggggctggatcagacagcctcctggcaaaggactggaatggatcggccacatctactacagcggcgtgacctactacaaccccagcctgaagtccagagtgaccatcagcgtggacaccagccggaaccagttctccctgaagctgtctagcgtgacagccgccgataccgccgtgtactactgcaccagagaggacagcagcaactggcggagtagaggccagggaacactggtcacagttagctctctcgagggcggaggcggaagtggaggcggaggatctggcggcggaggctctgtcgagatccagaaccctgatcctgccgtgtaccagctgcgggatagcaagagcagcgacaagagcgtgtgtctgttcaccgacttcgacagccagaccaacgtgtcccagagcaaggactccgacgtgtacatcaccgataagtgcgtgctggacatgcggagcatggacttcaagagcaactccgccgtggcctggtccaacaagtccgatttcgcctgcgccaacgccttcaacaacagcattatccccgaggacacattcttcccaagccccgagagcagctgcgacgtgaagctggtggaaaagagcttcgagacagacaccaacctgaacttccagaacctgagcgtgatcggcttcagaatcctgctgctgaaagtggccggctttaacctgctgatgaccctgcggctgtggtccagctctagtcgcgccaagagaagcggatctggcgtgaagcagaccctgaatttcgacctgctgaagctggctggcgacgtggaatccaacccaggccctactagtatggactggatttggcgcatccttttccttgtcggcgctgctaccggcgcgcattccttcgaagtgcagctgcttgaaagtggcggcggactgattcagcctggcggatctctgagactgagctgtgccgccagcggcttcaccttttctagccacgccatgacctgggtccgacaggcacctggaaaagggcttgaatgggtgtccgccatcagcggctctggcgattacacacactacgccgacagcgtgaagggcagattcaccatcagcagagacaacagcaagaacaccgtgtacctccagatgaacagcctgagagccgaggacagcgccgtgtattattgcgccaaggatgaggatggcggcagcctgcttggacacagaggacaaggcaccctggtcaccgtttcttccacgcgtatccagaaccctgatcctgccgtgtaccagctgcgggatagcaagagcagcgacaagagcgtgtgtctgttcaccgacttcgacagccagaccaacgtgtcccagagcaaggactccgacgtgtacatcaccgataagtgcgtgctggacatgcggagcatggacttcaagagcaactccgccgtggcctggtccaacaagtccgatttcgcctgcgccaacgccttcaacaacagcattatccccgaggacacattcttcccaagccccgagagcagctgcgacgtgaagctggtggaaaagagcttcgagacagacaccaacctgaacttccagaacctgagcgtgatcggcttcagaatcctgctgctgaaagtggccggctttaacctgctgatgaccctgcggctgtggtccagccgcgccaagagaagcggatctggcgtgaagcagaccctgaatttcgacctgctgaagctggctggcgacgtggaatccaacccaggcccttctagaggccatatgaccgagtacaagcccacggtgcgcctcgccacccgcgacgacgtccccagggccgtacgcaccctcgccgccgcgttcgccgactaccccgccacgcgccacaccgtcgatccggaccgccacatcgagcgggtcaccgagctgcaagaactcttcctcacgcgcgtcgggctcgacatcggcaaggtgtgggtcgcggacgacggcgccgcggtggcggtctggaccacgccggagagcgtcgaagcgggggcggtgttcgccgagatcggcccgcgcatggccgagttgagcggttcccggctggccgcgcagcaacagatggaaggcctcctggcgccgcaccggcccaaggagcccgcgtggttcctggccaccgtcggcgtctcgcccgaccaccagggcaagggtctgggcagcgccgtcgtgctccccggagtggaggcggccgagcgcgccggggtgcccgccttcctggagacctccgcgccccgcaacctccccttctacgagcggctcggcttcaccgtcaccgccgacgtcgaggtgcccgaaggaccgcgcacctggtgcatgacccgcaagcccggtgcctga

SEQ ID NO: 22070 - DNA, 2988 bp, Artificial Sequence
  Synthetic Polynucleotide
atggccttaccagtgaccgccttgctcctgccgctggccttgctgctccacgccgccaggccgcaggtgcagctggttgaatctggcggaggactggttcagcctggcggatctctgagactgtcttgtgccgccagcggcttcaccttcaccaatcacgccatgagctgggtccgacaggcccctggaaaaggactggaactggtgtctagcatcagcggcaacggcagaaccacctactacgccgatagcgtgaagggcagattcaccatcagccgggacatcagcaagaacaccctggacctccagatgaacagcctgagagccgaggataccgccgtgtactactgtgccaaggatggcggagagacactggtggatagcagaggccagggcacactggtcacagtgtcatctctcgagagcggcggaggcggatctttcgaagaggtgaaactgcaggagtcaggacctggcctggtggcgccctcacagagcctgtccgtcacatgcactgtctcaggggtctcattacccgactatggtgtaagctggattcgccagcctccacgaaagggtctggagtggctgggagtaatatggggtagtgaaaccacatactataattcagctctcaaatccagactgaccatcatcaaggacaactccaagagccaagttttcttaaaaatgaacagtctgcaaactgatgacacagccatttactactgtgccaaacattattactacggtggtagctatgctatggactactggggtcaaggaacctcagtcaccgtctcctcactcgaggacctgaagaacgtgttcccacctgaggtggccgtgttcgagcctagcgaggccgagatcagccacacccagaaagccaccctcgtgtgcctggctaccggcttctaccccgaccatgtggaactgtcttggtgggtcaacggcaaagaggtgcacagcggcgtgtgtaccgacccccagccactgaaagaacagcccgccctgaacgacagccggtactgcctgagcagcagactgagagtgtccgccaccttctggcagaacccccggaaccacttcagatgccaggtgcagttctacggcctgagcgagaacgacgagtggacccaggacagagccaagcccgtgacccagatcgtgtctgccgaagcctggggcagagccgattgcggctttaccagcgagagctaccagcagggcgtgctgagcgccaccatcctgtacgagatcctgctgggcaaggccaccctgtacgccgtgctggtgtctgccctggtgctgatggctatggtcaagcggaaggacagccggggaagggccaagcgatctggatctggagcaacaaacttctcactactcaaacaagcaggtgacgtggaggagaatcccgggcctactagtgccaccatggccttaccagtgaccgccttgctcctgccgctggccttgctgctccacgccgccaggccggacatccagatgacacagactacatcctccctgtctgcctctctgggagacagagtcaccatcagttgcagggcaagtcaggacattagtaaatatttaaattggtatcagcagaaaccagatggaactgttaaactcctgatctaccatacatcaagattacactcaggagtcccatcaaggttcagtggcagtgggtctggaacagattattctctcaccattagcaacctggagcaagaagatattgccacttacttttgccaacagggtaatacgcttccgtacacgttcggaggggggaccaagctggagatcacaacgcgtgagcagaaactgatctcggaagaggatgggagcggcatccagaaccctgatcctgccgtgtaccagctgcgggatagcaagagcagcgacaagagcgtgtgtctgttcaccgacttcgacagccagaccaacgtgtcccagagcaaggactccgacgtgtacatcaccgataagtgcgtgctggacatgcggagcatggacttcaagagcaactccgccgtggcctggtccaacaagtccgatttcgcctgcgccaacgccttcaacaacagcattatccccgaggacacattcttcccaagccccgagagcagctgcgacgtgaagctggtggaaaagagcttcgagacagacaccaacctgaacttccagaacctgagcgtgatcggcttcagaatcctgctgctgaaagtggccggctttaacctgctgatgaccctgcggctgtggtccagccgcgccaagagaagcggatctggcgtgaagcagaccctgaatttcgacctgctgaagctggctggcgacgtggaatccaacccaggcccttctagaggccatatgaccgagtacaagcccacggtgcgcctcgccacccgcgacgacgtccccagggccgtacgcaccctcgccgccgcgttcgccgactaccccgccacgcgccacaccgtcgatccggaccgccacatcgagcgggtcaccgagctgcaagaactcttcctcacgcgcgtcgggctcgacatcggcaaggtgtgggtcgcggacgacggcgccgcggtggcggtctggaccacgccggagagcgtcgaagcgggggcggtgttcgccgagatcggcccgcgcatggccgagttgagcggttcccggctggccgcgcagcaacagatggaaggcctcctggcgccgcaccggcccaaggagcccgcgtggttcctggccaccgtcggcgtctcgcccgaccaccagggcaagggtctgggcagcgccgtcgtgctccccggagtggaggcggccgagcgcgccggggtgcccgccttcctggagacctccgcgccccgcaacctccccttctacgagcggctcggcttcaccgtcaccgccgacgtcgaggtgcccgaaggaccgcgcacctggtgcatgacccgcaagcccggtgcctga

SEQ ID NO: 22071 - DNA, 2622 bp, Artificial Sequence
  Synthetic Polynucleotide
atggccttaccagtgaccgccttgctcctgccgctggccttgctgctccacgccgccaggccgcaggtgcagctggttgaatctggcggaggactggttcagcctggcggatctctgagactgtcttgtgccgccagcggcttcaccttcaccaatcacgccatgagctgggtccgacaggcccctggaaaaggactggaactggtgtctagcatcagcggcaacggcagaaccacctactacgccgatagcgtgaagggcagattcaccatcagccgggacatcagcaagaacaccctggacctccagatgaacagcctgagagccgaggataccgccgtgtactactgtgccaaggatggcggagagacactggtggatagcagaggccagggcacactggtcacagtgtcatctctcgagcctggtggcggaggatctcctgaggacctgaagaacgtgttcccacctgaggtggccgtgttcgagcctagcgaggccgagatcagccacacccagaaagccaccctcgtgtgcctggctaccggcttctaccccgaccatgtggaactgtcttggtgggtcaacggcaaagaggtgcacagcggcgtgtgtaccgacccccagccactgaaagaacagcccgccctgaacgacagccggtactgcctgagcagcagactgagagtgtccgccaccttctggcagaacccccggaaccacttcagatgccaggtgcagttctacggcctgagcgagaacgacgagtggacccaggacagagccaagcccgtgacccagatcgtgtctgccgaagcctggggcagagccgattgcggctttaccagcgagagctaccagcagggcgtgctgagcgccaccatcctgtacgagatcctgctgggcaaggccaccctgtacgccgtgctggtgtctgccctggtgctgatggctatggtcaagcggaaggacagccggggaagggccaagcgatctggatctggagcaacaaacttctcactactcaaacaagcaggtgacgtggaggagaatcccgggcctactagtatggactggatttggcgcatccttttccttgtcggcgctgctaccggcgcgcattccttcgaagaggttcagctgcttgagtctggcggaggactggttcaacctggcggaagcctgagactgtcttgtgccgccagcggcttcacctttagcagctacgccatgagctgggtccgacaggctcctggcaaaggactggaatgggtgtccagcatcagcggcagcggcgactacatctactacgccgatagcgtgaagggcagattcaccatcagccgggacatcagcaagaacaccctgtacctccagatgaacagcctgagagccgaggacaccgccgtgtactactgtgccaaagaaggcaccggcgctaacagcagcctggccgattatagaggccagggcacactggtcaccgtgtctagtacgcgtatccagaaccctgatcctgccgtgtaccagctgcgggatagcaagagcagcgacaagagcgtgtgtctgttcaccgacttcgacagccagaccaacgtgtcccagagcaaggactccgacgtgtacatcaccgataagtgcgtgctggacatgcggagcatggacttcaagagcaactccgccgtggcctggtccaacaagtccgatttcgcctgcgccaacgccttcaacaacagcattatccccgaggacacattcttcccaagccccgagagcagctgcgacgtgaagctggtggaaaagagcttcgagacagacaccaacctgaacttccagaacctgagcgtgatcggcttcagaatcctgctgctgaaagtggccggctttaacctgctgatgaccctgcggctgtggtccagccgcgccaagagaagcggatctggcgtgaagcagaccctgaatttcgacctgctgaagctggctggcgacgtggaatccaacccaggcccttctagaggccatatgaccgagtacaagcccacggtgcgcctcgccacccgcgacgacgtccccagggccgtacgcaccctcgccgccgcgttcgccgactaccccgccacgcgccacaccgtcgatccggaccgccacatcgagcgggtcaccgagctgcaagaactcttcctcacgcgcgtcgggctcgacatcggcaaggtgtgggtcgcggacgacggcgccgcggtggcggtctggaccacgccggagagcgtcgaagcgggggcggtgttcgccgagatcggcccgcgcatggccgagttgagcggttcccggctggccgcgcagcaacagatggaaggcctcctggcgccgcaccggcccaaggagcccgcgtggttcctggccaccgtcggcgtctcgcccgaccaccagggcaagggtctgggcagcgccgtcgtgctccccggagtggaggcggccgagcgcgccggggtgcccgccttcctggagacctccgcgccccgcaacctccccttctacgagcggctcggcttcaccgtcaccgccgacgtcgaggtgcccgaaggaccgcgcacctggtgcatgacccgcaagcccggtgcctga

SEQ ID NO: 22072 - DNA, 2574 bp, Artificial Sequence
  Synthetic Polynucleotide
atggccttaccagtgaccgccttgctcctgccgctggccttgctgctccacgccgccaggccgcagctccagctgcaagagtctggacctggcctggtcaagcctagcgagacactgagcctgacctgtaccgtgtccggcgatagcatcagcagcggcgattactactggggctggatcagacagcctcctggcaaaggactggaatggatcggccacatctactacagcggcgtgacctactacaaccccagcctgaagtccagagtgaccatcagcgtggacaccagccggaaccagttctccctgaagctgtctagcgtgacagccgccgataccgccgtgtactactgcaccagagaggacagcagcaactggcggagtagaggccagggaacactggtcacagttagctctctcgagggacagcctaaggccaatcctaccgtgacactgttccctccaagcagcgaagaactccaggccaacaaggccacacttgtgtgcctgatctccgacttctaccctggggctgtgacagtggcttggaaggccgatggatctcctgtgaaagccggcgtggaaaccaccaagccatccaagcagagcaacaacaaatacgccgccagctcctacctgagcctgacacctgagcagtggaagtcccacagatcctacagctgccaagtgacccacgaaggcagcaccgtggaaaagacagtggcccctacagagtgcagccccatcaagaccgatgtgattacaatggaccccaaggacaactgctccaaggacgccaacgataccctgctgctccagctgaccaacaccagcgcctactacatgtacttgttgctgctgctgaagtccgtggtgtacttcgccatcatcacatgctgcctgctgcggagaaccgccttctgctgcaacggcgagaagtctagggccaagcgatctggatctggagcaacaaacttctcactactcaaacaagcaggtgacgtggaggagaatcccgggcctactagtatggactggatttggcgcatccttttccttgtcggcgctgctaccggcgcgcattccttcgaagtgcagctgcttgaaagtggcggcggactgattcagcctggcggatctctgagactgagctgtgccgccagcggcttcaccttttctagccacgccatgacctgggtccgacaggcacctggaaaagggcttgaatgggtgtccgccatcagcggctctggcgattacacacactacgccgacagcgtgaagggcagattcaccatcagcagagacaacagcaagaacaccgtgtacctccagatgaacagcctgagagccgaggacagcgccgtgtattattgcgccaaggatgaggatggcggcagcctgcttggacacagaggacaaggcaccctggtcaccgtttcttccacgcgtatccagaaccctgatcctgccgtgtaccagctgcgggatagcaagagcagcgacaagagcgtgtgtctgttcaccgacttcgacagccagaccaacgtgtcccagagcaaggactccgacgtgtacatcaccgataagtgcgtgctggacatgcggagcatggacttcaagagcaactccgccgtggcctggtccaacaagtccgatttcgcctgcgccaacgccttcaacaacagcattatccccgaggacacattcttcccaagccccgagagcagctgcgacgtgaagctggtggaaaagagcttcgagacagacaccaacctgaacttccagaacctgagcgtgatcggcttcagaatcctgctgctgaaagtggccggctttaacctgctgatgaccctgcggctgtggtccagccgcgccaagagaagcggatctggcgtgaagcagaccctgaatttcgacctgctgaagctggctggcgacgtggaatccaacccaggcccttctagaggccatatgaccgagtacaagcccacggtgcgcctcgccacccgcgacgacgtccccagggccgtacgcaccctcgccgccgcgttcgccgactaccccgccacgcgccacaccgtcgatccggaccgccacatcgagcgggtcaccgagctgcaagaactcttcctcacgcgcgtcgggctcgacatcggcaaggtgtgggtcgcggacgacggcgccgcggtggcggtctggaccacgccggagagcgtcgaagcgggggcggtgttcgccgagatcggcccgcgcatggccgagttgagcggttcccggctggccgcgcagcaacagatggaaggcctcctggcgccgcaccggcccaaggagcccgcgtggttcctggccaccgtcggcgtctcgcccgaccaccagggcaagggtctgggcagcgccgtcgtgctccccggagtggaggcggccgagcgcgccggggtgcccgccttcctggagacctccgcgccccgcaacctccccttctacgagcggctcggcttcaccgtcaccgccgacgtcgaggtgcccgaaggaccgcgcacctggtgcatgacccgcaagcccggtgcctga

SEQ ID NO: 22073 - DNA, 2532 bp, Artificial Sequence
  Synthetic Polynucleotide
atggccttaccagtgaccgccttgctcctgccgctggccttgctgctccacgccgccaggccgcagctccagctgcaagagtctggacctggcctggtcaagcctagcgagacactgagcctgacctgtaccgtgtccggcgatagcatcagcagcggcgattactactggggctggatcagacagcctcctggcaaaggactggaatggatcggccacatctactacagcggcgtgacctactacaaccccagcctgaagtccagagtgaccatcagcgtggacaccagccggaaccagttctccctgaagctgtctagcgtgacagccgccgataccgccgtgtactactgcaccagagaggacagcagcaactggcggagtagaggccagggaacactggtcacagttagctctctcgagggacagcctaaggccaatcctaccgtgacactgttccctccaagcagcgaagaactccaggccaacaaggccacacttgtgtgcctgatctccgacttctaccctggggctgtgacagtggcttggaaggccgatggatctcctgtgaaagccggcgtggaaaccaccaagccatccaagcagagcaacaacaaatacgccgccagctcctacctgagcctgacacctgagcagtggaagtcccacagatcctacagctgccaagtgacccacgaaggcagcaccgtggaaaagacagtggcccctacagagtgcagcggcagagccgattgcggctttaccagcgagagctaccagcagggcgtgctgagcgccaccatcctgtacgagatcctgctgggcaaggccaccctgtacgccgtgctggtgtctgccctggtgctgatggctatggtcaagcggaaggacagccggggaagggccaagcgatctggatctggagcaacaaacttctcactactcaaacaagcaggtgacgtggaggagaatcccgggcctactagtatggactggatttggcgcatccttttccttgtcggcgctgctaccggcgcgcattccttcgaagtgcagctgcttgaaagtggcggcggactgattcagcctggcggatctctgagactgagctgtgccgccagcggcttcaccttttctagccacgccatgacctgggtccgacaggcacctggaaaagggcttgaatgggtgtccgccatcagcggctctggcgattacacacactacgccgacagcgtgaagggcagattcaccatcagcagagacaacagcaagaacaccgtgtacctccagatgaacagcctgagagccgaggacagcgccgtgtattattgcgccaaggatgaggatggcggcagcctgcttggacacagaggacaaggcaccctggtcaccgtttcttccacgcgtatccagaaccctgatcctgccgtgtaccagctgcgggatagcaagagcagcgacaagagcgtgtgtctgttcaccgacttcgacagccagaccaacgtgtcccagagcaaggactccgacgtgtacatcaccgataagtgcgtgctggacatgcggagcatggacttcaagagcaactccgccgtggcctggtccaacaagtccgatttcgcctgcgccaacgccttcaacaacagcattatccccgaggacacattcttcccaagccccgagagcagctgcgacgtgaagctggtggaaaagagcttcgagacagacaccaacctgaacttccagaacctgagcgtgatcggcttcagaatcctgctgctgaaagtggccggctttaacctgctgatgaccctgcggctgtggtccagccgcgccaagagaagcggatctggcgtgaagcagaccctgaatttcgacctgctgaagctggctggcgacgtggaatccaacccaggcccttctagaggccatatgaccgagtacaagcccacggtgcgcctcgccacccgcgacgacgtccccagggccgtacgcaccctcgccgccgcgttcgccgactaccccgccacgcgccacaccgtcgatccggaccgccacatcgagcgggtcaccgagctgcaagaactcttcctcacgcgcgtcgggctcgacatcggcaaggtgtgggtcgcggacgacggcgccgcggtggcggtctggaccacgccggagagcgtcgaagcgggggcggtgttcgccgagatcggcccgcgcatggccgagttgagcggttcccggctggccgcgcagcaacagatggaaggcctcctggcgccgcaccggcccaaggagcccgcgtggttcctggccaccgtcggcgtctcgcccgaccaccagggcaagggtctgggcagcgccgtcgtgctccccggagtggaggcggccgagcgcgccggggtgcccgccttcctggagacctccgcgccccgcaacctccccttctacgagcggctcggcttcaccgtcaccgccgacgtcgaggtgcccgaaggaccgcgcacctggtgcatgacccgcaagcccggtgcctga

SEQ ID NO: 22074 - DNA, 2583 bp, Artificial Sequence
  Synthetic Polynucleotide
atggccttaccagtgaccgccttgctcctgccgctggccttgctgctccacgccgccaggccgcaggtgcagctggttgaatctggcggaggactggttcagcctggcggatctctgagactgtcttgtgccgccagcggcttcaccttcaccaatcacgccatgagctgggtccgacaggcccctggaaaaggactggaactggtgtctagcatcagcggcaacggcagaaccacctactacgccgatagcgtgaagggcagattcaccatcagccgggacatcagcaagaacaccctggacctccagatgaacagcctgagagccgaggataccgccgtgtactactgtgccaaggatggcggagagacactggtggatagcagaggccagggcacactggtcacagtgtcatctctcgagggacagcctaaggccaatcctaccgtgacactgttccctccaagcagcgaagaactccaggccaacaaggccacacttgtgtgcctgatctccgacttctaccctggggctgtgacagtggcttggaaggccgatggatctcctgtgaaagccggcgtggaaaccaccaagccatccaagcagagcaacaacaaatacgccgccagctcctacctgagcctgacacctgagcagtggaagtcccacagatcctacagctgccaagtgacccacgaaggcagcaccgtggaaaagacagtggcccctacagagtgcagccccatcaagaccgatgtgattacaatggaccccaaggacaactgctccaaggacgccaacgataccctgctgctccagctgaccaacaccagcgcctactacatgtacttgttgctgctgctgaagtccgtggtgtacttcgccatcatcacatgctgcctgctgcggagaaccgccttctgctgcaacggcgagaagtctagggccaagcgatctggatctggagcaacaaacttctcactactcaaacaagcaggtgacgtggaggagaatcccgggcctactagtatggactggatttggcgcatccttttccttgtcggcgctgctaccggcgcgcattccttcgaagaggttcagctgcttgagtctggcggaggactggttcaacctggcggaagcctgagactgtcttgtgccgccagcggcttcacctttagcagctacgccatgagctgggtccgacaggctcctggcaaaggactggaatgggtgtccagcatcagcggcagcggcgactacatctactacgccgatagcgtgaagggcagattcaccatcagccgggacatcagcaagaacaccctgtacctccagatgaacagcctgagagccgaggacaccgccgtgtactactgtgccaaagaaggcaccggcgctaacagcagcctggccgattatagaggccagggcacactggtcaccgtgtctagtacgcgtatccagaaccctgatcctgccgtgtaccagctgcgggatagcaagagcagcgacaagagcgtgtgtctgttcaccgacttcgacagccagaccaacgtgtcccagagcaaggactccgacgtgtacatcaccgataagtgcgtgctggacatgcggagcatggacttcaagagcaactccgccgtggcctggtccaacaagtccgatttcgcctgcgccaacgccttcaacaacagcattatccccgaggacacattcttcccaagccccgagagcagctgcgacgtgaagctggtggaaaagagcttcgagacagacaccaacctgaacttccagaacctgagcgtgatcggcttcagaatcctgctgctgaaagtggccggctttaacctgctgatgaccctgcggctgtggtccagccgcgccaagagaagcggatctggcgtgaagcagaccctgaatttcgacctgctgaagctggctggcgacgtggaatccaacccaggcccttctagaggccatatgaccgagtacaagcccacggtgcgcctcgccacccgcgacgacgtccccagggccgtacgcaccctcgccgccgcgttcgccgactaccccgccacgcgccacaccgtcgatccggaccgccacatcgagcgggtcaccgagctgcaagaactcttcctcacgcgcgtcgggctcgacatcggcaaggtgtgggtcgcggacgacggcgccgcggtggcggtctggaccacgccggagagcgtcgaagcgggggcggtgttcgccgagatcggcccgcgcatggccgagttgagcggttcccggctggccgcgcagcaacagatggaaggcctcctggcgccgcaccggcccaaggagcccgcgtggttcctggccaccgtcggcgtctcgcccgaccaccagggcaagggtctgggcagcgccgtcgtgctccccggagtggaggcggccgagcgcgccggggtgcccgccttcctggagacctccgcgccccgcaacctccccttctacgagcggctcggcttcaccgtcaccgccgacgtcgaggtgcccgaaggaccgcgcacctggtgcatgacccgcaagcccggtgcctga

SEQ ID NO: 22075 - DNA, 2541 bp, Artificial Sequence
  Synthetic Polynucleotide
atggccttaccagtgaccgccttgctcctgccgctggccttgctgctccacgccgccaggccgcaggtgcagctggttgaatctggcggaggactggttcagcctggcggatctctgagactgtcttgtgccgccagcggcttcaccttcaccaatcacgccatgagctgggtccgacaggcccctggaaaaggactggaactggtgtctagcatcagcggcaacggcagaaccacctactacgccgatagcgtgaagggcagattcaccatcagccgggacatcagcaagaacaccctggacctccagatgaacagcctgagagccgaggataccgccgtgtactactgtgccaaggatggcggagagacactggtggatagcagaggccagggcacactggtcacagtgtcatctctcgagggacagcctaaggccaatcctaccgtgacactgttccctccaagcagcgaagaactccaggccaacaaggccacacttgtgtgcctgatctccgacttctaccctggggctgtgacagtggcttggaaggccgatggatctcctgtgaaagccggcgtggaaaccaccaagccatccaagcagagcaacaacaaatacgccgccagctcctacctgagcctgacacctgagcagtggaagtcccacagatcctacagctgccaagtgacccacgaaggcagcaccgtggaaaagacagtggcccctacagagtgcagcggcagagccgattgcggctttaccagcgagagctaccagcagggcgtgctgagcgccaccatcctgtacgagatcctgctgggcaaggccaccctgtacgccgtgctggtgtctgccctggtgctgatggctatggtcaagcggaaggacagccggggaagggccaagcgatctggatctggagcaacaaacttctcactactcaaacaagcaggtgacgtggaggagaatcccgggcctactagtatggactggatttggcgcatccttttccttgtcggcgctgctaccggcgcgcattccttcgaagaggttcagctgcttgagtctggcggaggactggttcaacctggcggaagcctgagactgtcttgtgccgccagcggcttcacctttagcagctacgccatgagctgggtccgacaggctcctggcaaaggactggaatgggtgtccagcatcagcggcagcggcgactacatctactacgccgatagcgtgaagggcagattcaccatcagccgggacatcagcaagaacaccctgtacctccagatgaacagcctgagagccgaggacaccgccgtgtactactgtgccaaagaaggcaccggcgctaacagcagcctggccgattatagaggccagggcacactggtcaccgtgtctagtacgcgtatccagaaccctgatcctgccgtgtaccagctgcgggatagcaagagcagcgacaagagcgtgtgtctgttcaccgacttcgacagccagaccaacgtgtcccagagcaaggactccgacgtgtacatcaccgataagtgcgtgctggacatgcggagcatggacttcaagagcaactccgccgtggcctggtccaacaagtccgatttcgcctgcgccaacgccttcaacaacagcattatccccgaggacacattcttcccaagccccgagagcagctgcgacgtgaagctggtggaaaagagcttcgagacagacaccaacctgaacttccagaacctgagcgtgatcggcttcagaatcctgctgctgaaagtggccggctttaacctgctgatgaccctgcggctgtggtccagccgcgccaagagaagcggatctggcgtgaagcagaccctgaatttcgacctgctgaagctggctggcgacgtggaatccaacccaggcccttctagaggccatatgaccgagtacaagcccacggtgcgcctcgccacccgcgacgacgtccccagggccgtacgcaccctcgccgccgcgttcgccgactaccccgccacgcgccacaccgtcgatccggaccgccacatcgagcgggtcaccgagctgcaagaactcttcctcacgcgcgtcgggctcgacatcggcaaggtgtgggtcgcggacgacggcgccgcggtggcggtctggaccacgccggagagcgtcgaagcgggggcggtgttcgccgagatcggcccgcgcatggccgagttgagcggttcccggctggccgcgcagcaacagatggaaggcctcctggcgccgcaccggcccaaggagcccgcgtggttcctggccaccgtcggcgtctcgcccgaccaccagggcaagggtctgggcagcgccgtcgtgctccccggagtggaggcggccgagcgcgccggggtgcccgccttcctggagacctccgcgccccgcaacctccccttctacgagcggctcggcttcaccgtcaccgccgacgtcgaggtgcccgaaggaccgcgcacctggtgcatgacccgcaagcccggtgcctga

SEQ ID NO: 22076 - DNA, 1998 bp, Artificial Sequence
  Synthetic Polynucleotide
atggccttaccagtgaccgccttgctcctgccgctggccttgctgctccacgccgccaggccgcagctccagctgcaagagtctggacctggcctggtcaagcctagcgagacactgagcctgacctgtaccgtgtccggcgatagcatcagcagcggcgattactactggggctggatcagacagcctcctggcaaaggactggaatggatcggccacatctactacagcggcgtgacctactacaaccccagcctgaagtccagagtgaccatcagcgtggacaccagccggaaccagttctccctgaagctgtctagcgtgacagccgccgataccgccgtgtactactgcaccagagaggacagcagcaactggcggagtagaggccagggaacactggtcacagttagctctctcgagagcggcggaggcggatctttcgaacaggtgcagctggttgaatctggcggaggactggttcagcctggcggatctctgagactgtcttgtgccgccagcggcttcaccttcaccaatcacgccatgagctgggtccgacaggcccctggaaaaggactggaactggtgtctagcatcagcggcaacggcagaaccacctactacgccgatagcgtgaagggcagattcaccatcagccgggacatcagcaagaacaccctggacctccagatgaacagcctgagagccgaggataccgccgtgtactactgtgccaaggatggcggagagacactggtggatagcagaggccagggcacactggtcacagtgtcatctacgcgtgcctctacaaagggaccctccgtgtttcctctggctcccagcagcaagtctacaagcggaggaacagccgctctgggctgcctggtcaaggattactttcccgagcctgtgaccgtgtcctggaatagcggagcactgacaagcggcgtgcacacctttccagccgtgctgcaaagcagcggcctgtactctctgagcagcgtggtcacagtgcctagctctagcctgggcacccagacctacatctgcaatgtgaaccacaagcctagcaacaccaaggtggacaagagagtggaacccaagagctgtatccccgaggacacattcttcccaagccccgagagcagctgcgacgtgaagctggtggaaaagagcttcgagacagacaccaacctgaacttccagaacctgagcgtgatcggcttcagaatcctgctgctgaaagtggccggctttaacctgctgatgaccctgcggctgtggtccagccgcgccaagagaagcggatctggcgtgaagcagaccctgaatttcgacctgctgaagctggctggcgacgtggaatccaacccaggcccttctagaggccatatgaccgagtacaagcccacggtgcgcctcgccacccgcgacgacgtccccagggccgtacgcaccctcgccgccgcgttcgccgactaccccgccacgcgccacaccgtcgatccggaccgccacatcgagcgggtcaccgagctgcaagaactcttcctcacgcgcgtcgggctcgacatcggcaaggtgtgggtcgcggacgacggcgccgcggtggcggtctggaccacgccggagagcgtcgaagcgggggcggtgttcgccgagatcggcccgcgcatggccgagttgagcggttcccggctggccgcgcagcaacagatggaaggcctcctggcgccgcaccggcccaaggagcccgcgtggttcctggccaccgtcggcgtctcgcccgaccaccagggcaagggtctgggcagcgccgtcgtgctccccggagtggaggcggccgagcgcgccggggtgcccgccttcctggagacctccgcgccccgcaacctccccttctacgagcggctcggcttcaccgtcaccgccgacgtcgaggtgcccgaaggaccgcgcacctggtgcatgacccgcaagcccggtgcctga

SEQ ID NO: 22077 - DNA, 1704 bp, Artificial Sequence
  Synthetic Polynucleotide
atggccttaccagtgaccgccttgctcctgccgctggccttgctgctccacgccgccaggccgcagctccagctgcaagagtctggacctggcctggtcaagcctagcgagacactgagcctgacctgtaccgtgtccggcgatagcatcagcagcggcgattactactggggctggatcagacagcctcctggcaaaggactggaatggatcggccacatctactacagcggcgtgacctactacaaccccagcctgaagtccagagtgaccatcagcgtggacaccagccggaaccagttctccctgaagctgtctagcgtgacagccgccgataccgccgtgtactactgcaccagagaggacagcagcaactggcggagtagaggccagggaacactggtcacagttagctctctcgaggggaaaccaattcccaaccctcttctgggactggattcaaccggcagcggcgaggacctgaagaacgtgttcccacctgaggtggccgtgttcgagcctagcaaggccgagatcgcccacacccagaaagccaccctcgtgtgcctggctaccggcttctaccccgaccatgtggaactgtcttggtgggtcaacggcaaagaggtgcacagcggcgtgtgtaccgacccccagccactgaaagaacagcccgccctgaacgacagccggtactgcctgagcagcagactgagagtgtccgccaccttctggcagaacccccggaaccacttcagatgccaggtgcagttctacggcctgagcgagaacgacgagtggacccaggacagagccaagcccgtgacccagatcgtgtctgccgaagcctggggcagagccgattgcggcatcaccagcgccagctaccaccagggcgtgctgagcgccaccatcctgtacgagatcctgctgggcaaggccaccctgtacgccgtgctggtgtctgccctggtgctgatggctatggtcaagcggaaggacagccggggaagggccaagcgatctggatctggagcaacaaacttctcactactcaaacaagcaggtgacgtggaggagaatcccgggcctactagaggccatatgaccgagtacaagcccacggtgcgcctcgccacccgcgacgacgtccccagggccgtacgcaccctcgccgccgcgttcgccgactaccccgccacgcgccacaccgtcgatccggaccgccacatcgagcgggtcaccgagctgcaagaactcttcctcacgcgcgtcgggctcgacatcggcaaggtgtgggtcgcggacgacggcgccgcggtggcggtctggaccacgccggagagcgtcgaagcgggggcggtgttcgccgagatcggcccgcgcatggccgagttgagcggttcccggctggccgcgcagcaacagatggaaggcctcctggcgccgcaccggcccaaggagcccgcgtggttcctggccaccgtcggcgtctcgcccgaccaccagggcaagggtctgggcagcgccgtcgtgctccccggagtggaggcggccgagcgcgccggggtgcccgccttcctggagacctccgcgccccgcaacctccccttctacgagcggctcggcttcaccgtcaccgccgacgtcgaggtgcccgaaggaccgcgcacctggtgcatgacccgcaagcccggtgcctga

SEQ ID NO: 22078 - DNA, 2031 bp, Artificial Sequence
  Synthetic Polynucleotide
atggccttaccagtgaccgccttgctcctgccgctggccttgctgctccacgccgccaggccgcagctccagctgcaagagtctggacctggcctggtcaagcctagcgagacactgagcctgacctgtaccgtgtccggcgatagcatcagcagcggcgattactactggggctggatcagacagcctcctggcaaaggactggaatggatcggccacatctactacagcggcgtgacctactacaaccccagcctgaagtccagagtgaccatcagcgtggacaccagccggaaccagttctccctgaagctgtctagcgtgacagccgccgataccgccgtgtactactgcaccagagaggacagcagcaactggcggagtagaggccagggaacactggtcacagttagctctctcgagagcggcggaggcggatctttcgaagaggttcagctgcttgagtctggcggaggactggttcaacctggcggaagcctgagactgtcttgtgccgccagcggcttcacctttagcagctacgccatgagctgggtccgacaggctcctggcaaaggactggaatgggtgtccagcatcagcggcagcggcgactacatctactacgccgatagcgtgaagggcagattcaccatcagccgggacatcagcaagaacaccctgtacctccagatgaacagcctgagagccgaggacaccgccgtgtactactgtgccaaagaaggcaccggcgctaacagcagcctggccgattatagaggccagggcacactggtcaccgtgtctagtacgcgtgcctctacaaagggaccctccgtgtttcctctggctcccagcagcaagtctacaagcggaggaacagccgctctgggctgcctggtcaaggattactttcccgagcctgtgaccgtgtcctggaatagcggagcactgacaagcggcgtgcacacctttccagccgtgctgcaaagcagcggcctgtactctctgagcagcgtggtcacagtgcctagctctagcctgggcacccagacctacatctgcaatgtgaaccacaagcctagcaacaccaaggtggacaagagagtggaacccaagagctgtgaagtgaaaaccgactccaccgaccacgtgaagcccaaagagacagagaacaccaagcagcccagcaagagctgccacaagcccaaggccatcgtgcacaccgagaaagtgaacatgatgagcctgaccgtgctgggcctgcggatgctgttcgccaaaaccgtggccgtgaacttcctgctgaccgccaagctgttcttcctccgcgccaagagaagcggatctggcgtgaagcagaccctgaatttcgacctgctgaagctggctggcgacgtggaatccaacccaggcccttctagaggccatatgaccgagtacaagcccacggtgcgcctcgccacccgcgacgacgtccccagggccgtacgcaccctcgccgccgcgttcgccgactaccccgccacgcgccacaccgtcgatccggaccgccacatcgagcgggtcaccgagctgcaagaactcttcctcacgcgcgtcgggctcgacatcggcaaggtgtgggtcgcggacgacggcgccgcggtggcggtctggaccacgccggagagcgtcgaagcgggggcggtgttcgccgagatcggcccgcgcatggccgagttgagcggttcccggctggccgcgcagcaacagatggaaggcctcctggcgccgcaccggcccaaggagcccgcgtggttcctggccaccgtcggcgtctcgcccgaccaccagggcaagggtctgggcagcgccgtcgtgctccccggagtggaggcggccgagcgcgccggggtgcccgccttcctggagacctccgcgccccgcaacctccccttctacgagcggctcggcttcaccgtcaccgccgacgtcgaggtgcccgaaggaccgcgcacctggtgcatgacccgcaagcccggtgcctga

SEQ ID NO: 22079 - DNA, 2058 bp, Artificial Sequence
  Synthetic Polynucleotide
atggccttaccagtgaccgccttgctcctgccgctggccttgctgctccacgccgccaggccggaggtgcagctggttgaatctggtggcggagttgtgcagcctggcagaagcctgagactgtcttgtgccgccagcggctttagcttcagcggctatggaatgcactgggtccgacaggcccctggcaaaggacttgagtgggtcgcctacatcagctacgacggcagcaacaagtattacgccgacagcgtgaagggcagattcaccatcagccgggacaacagcaagaacaccctgtacctccagatgaacagcctgagagccgaggacaccgccgtgtactactgcgccaaagatcctgcctggggactgagactgggcgagagcagcagctacgatttcgacatctggggccagggcacaatggtcacagtttctagcggatccggcggaggcggaagtggaggcggaggatctggcggcggaggctctttcgaagttcagctgctggaatctggcggaggactcgttcaacctggcggctctctgagactgagctgtgccgcttctggcttcagcttctctagctacgccctgagctgggttcgacaagctcccggaaagggccttgaatgggtgtccagcatcggcgagaatgacggcaccacagactatgccgatgccgtgaaaggccggtttaccatcagcagagacaattccaagaacacgctctatctgcaaatgaactccctgcgcgtggaagatacagccgtgtattattgcgtgaaggacggcgtgcactggggacagggaaccctggttacagtgtctagcacgcgtgcctctacaaagggaccctccgtgtttcctctggctcccagcagcaagtctacaagcggaggaacagccgctctgggctgcctggtcaaggattactttcccgagcctgtgaccgtgtcctggaatagcggagcactgacaagcggcgtgcacacctttccagccgtgctgcaaagcagcggcctgtactctctgagcagcgtggtcacagtgcctagctctagcctgggcacccagacctacatctgcaatgtgaaccacaagcctagcaacaccaaggtggacaagagagtggaacccaagagctgtgaagtgaaaaccgactccaccgaccacgtgaagcccaaagagacagagaacaccaagcagcccagcaagagctgccacaagcccaaggccatcgtgcacaccgagaaagtgaacatgatgagcctgaccgtgctgggcctgcggatgctgttcgccaaaaccgtggccgtgaacttcctgctgaccgccaagctgttcttcctccgcgccaagagaagcggatctggcgtgaagcagaccctgaatttcgacctgctgaagctggctggcgacgtggaatccaacccaggcccttctagaggccatatgaccgagtacaagcccacggtgcgcctcgccacccgcgacgacgtccccagggccgtacgcaccctcgccgccgcgttcgccgactaccccgccacgcgccacaccgtcgatccggaccgccacatcgagcgggtcaccgagctgcaagaactcttcctcacgcgcgtcgggctcgacatcggcaaggtgtgggtcgcggacgacggcgccgcggtggcggtctggaccacgccggagagcgtcgaagcgggggcggtgttcgccgagatcggcccgcgcatggccgagttgagcggttcccggctggccgcgcagcaacagatggaaggcctcctggcgccgcaccggcccaaggagcccgcgtggttcctggccaccgtcggcgtctcgcccgaccaccagggcaagggtctgggcagcgccgtcgtgctccccggagtggaggcggccgagcgcgccggggtgcccgccttcctggagacctccgcgccccgcaacctccccttctacgagcggctcggcttcaccgtcaccgccgacgtcgaggtgcccgaaggaccgcgcacctggtgcatgacccgcaagcccggtgcctga

SEQ ID NO: 22080 - DNA, 2007 bp, Artificial Sequence
  Synthetic Polynucleotide
atggccttaccagtgaccgccttgctcctgccgctggccttgctgctccacgccgccaggccgcagctccagctgcaagagtctggacctggcctggtcaagcctagcgagacactgagcctgacctgtaccgtgtccggcgatagcatcagcagcggcgattactactggggctggatcagacagcctcctggcaaaggactggaatggatcggccacatctactacagcggcgtgacctactacaaccccagcctgaagtccagagtgaccatcagcgtggacaccagccggaaccagttctccctgaagctgtctagcgtgacagccgccgataccgccgtgtactactgcaccagagaggacagcagcaactggcggagtagaggccagggaacactggtcacagttagctctctcgagagcggcggaggcggatctttcgaagaggttcagctgcttgagtctggcggaggactggttcaacctggcggaagcctgagactgtcttgtgccgccagcggcttcacctttagcagctacgccatgagctgggtccgacaggctcctggcaaaggactggaatgggtgtccagcatcagcggcagcggcgactacatctactacgccgatagcgtgaagggcagattcaccatcagccgggacatcagcaagaacaccctgtacctccagatgaacagcctgagagccgaggacaccgccgtgtactactgtgccaaagaaggcaccggcgctaacagcagcctggccgattatagaggccagggcacactggtcaccgtgtctagtacgcgtgcctctacaaagggaccctccgtgtttcctctggctcccagcagcaagtctacaagcggaggaacagccgctctgggctgcctggtcaaggattactttcccgagcctgtgaccgtgtcctggaatagcggagcactgacaagcggcgtgcacacctttccagccgtgctgcaaagcagcggcctgtactctctgagcagcgtggtcacagtgcctagctctagcctgggcacccagacctacatctgcaatgtgaaccacaagcctagcaacaccaaggtggacaagagagtggaacccaagagctgtatccccgaggacacattcttcccaagccccgagagcagctgcgacgtgaagctggtggaaaagagcttcgagacagacaccaacctgaacttccagaacctgagcgtgatcggcttcagaatcctgctgctgaaagtggccggctttaacctgctgatgaccctgcggctgtggtccagccgcgccaagagaagcggatctggcgtgaagcagaccctgaatttcgacctgctgaagctggctggcgacgtggaatccaacccaggcccttctagaggccatatgaccgagtacaagcccacggtgcgcctcgccacccgcgacgacgtccccagggccgtacgcaccctcgccgccgcgttcgccgactaccccgccacgcgccacaccgtcgatccggaccgccacatcgagcgggtcaccgagctgcaagaactcttcctcacgcgcgtcgggctcgacatcggcaaggtgtgggtcgcggacgacggcgccgcggtggcggtctggaccacgccggagagcgtcgaagcgggggcggtgttcgccgagatcggcccgcgcatggccgagttgagcggttcccggctggccgcgcagcaacagatggaaggcctcctggcgccgcaccggcccaaggagcccgcgtggttcctggccaccgtcggcgtctcgcccgaccaccagggcaagggtctgggcagcgccgtcgtgctccccggagtggaggcggccgagcgcgccggggtgcccgccttcctggagacctccgcgccccgcaacctccccttctacgagcggctcggcttcaccgtcaccgccgacgtcgaggtgcccgaaggaccgcgcacctggtgcatgacccgcaagcccggtgcctga

SEQ ID NO: 22081 - DNA, 2034 bp, Artificial Sequence
  Synthetic Polynucleotide
atggccttaccagtgaccgccttgctcctgccgctggccttgctgctccacgccgccaggccggaggtgcagctggttgaatctggtggcggagttgtgcagcctggcagaagcctgagactgtcttgtgccgccagcggctttagcttcagcggctatggaatgcactgggtccgacaggcccctggcaaaggacttgagtgggtcgcctacatcagctacgacggcagcaacaagtattacgccgacagcgtgaagggcagattcaccatcagccgggacaacagcaagaacaccctgtacctccagatgaacagcctgagagccgaggacaccgccgtgtactactgcgccaaagatcctgcctggggactgagactgggcgagagcagcagctacgatttcgacatctggggccagggcacaatggtcacagtttctagcggatccggcggaggcggaagtggaggcggaggatctggcggcggaggctctttcgaagttcagctgctggaatctggcggaggactcgttcaacctggcggctctctgagactgagctgtgccgcttctggcttcagcttctctagctacgccctgagctgggttcgacaagctcccggaaagggccttgaatgggtgtccagcatcggcgagaatgacggcaccacagactatgccgatgccgtgaaaggccggtttaccatcagcagagacaattccaagaacacgctctatctgcaaatgaactccctgcgcgtggaagatacagccgtgtattattgcgtgaaggacggcgtgcactggggacagggaaccctggttacagtgtctagcacgcgtgcctctacaaagggaccctccgtgtttcctctggctcccagcagcaagtctacaagcggaggaacagccgctctgggctgcctggtcaaggattactttcccgagcctgtgaccgtgtcctggaatagcggagcactgacaagcggcgtgcacacctttccagccgtgctgcaaagcagcggcctgtactctctgagcagcgtggtcacagtgcctagctctagcctgggcacccagacctacatctgcaatgtgaaccacaagcctagcaacaccaaggtggacaagagagtggaacccaagagctgtatccccgaggacacattcttcccaagccccgagagcagctgcgacgtgaagctggtggaaaagagcttcgagacagacaccaacctgaacttccagaacctgagcgtgatcggcttcagaatcctgctgctgaaagtggccggctttaacctgctgatgaccctgcggctgtggtccagccgcgccaagagaagcggatctggcgtgaagcagaccctgaatttcgacctgctgaagctggctggcgacgtggaatccaacccaggcccttctagaggccatatgaccgagtacaagcccacggtgcgcctcgccacccgcgacgacgtccccagggccgtacgcaccctcgccgccgcgttcgccgactaccccgccacgcgccacaccgtcgatccggaccgccacatcgagcgggtcaccgagctgcaagaactcttcctcacgcgcgtcgggctcgacatcggcaaggtgtgggtcgcggacgacggcgccgcggtggcggtctggaccacgccggagagcgtcgaagcgggggcggtgttcgccgagatcggcccgcgcatggccgagttgagcggttcccggctggccgcgcagcaacagatggaaggcctcctggcgccgcaccggcccaaggagcccgcgtggttcctggccaccgtcggcgtctcgcccgaccaccagggcaagggtctgggcagcgccgtcgtgctccccggagtggaggcggccgagcgcgccggggtgcccgccttcctggagacctccgcgccccgcaacctccccttctacgagcggctcggcttcaccgtcaccgccgacgtcgaggtgcccgaaggaccgcgcacctggtgcatgacccgcaagcccggtgcctga

SEQ ID NO: 22082 - DNA, 1998 bp, Artificial Sequence
  Synthetic Polynucleotide
atggccttaccagtgaccgccttgctcctgccgctggccttgctgctccacgccgccaggccgcagctccagctgcaagagtctggacctggcctggtcaagcctagcgagacactgagcctgacctgtaccgtgtccggcgatagcatcagcagcggcgattactactggggctggatcagacagcctcctggcaaaggactggaatggatcggccacatctactacagcggcgtgacctactacaaccccagcctgaagtccagagtgaccatcagcgtggacaccagccggaaccagttctccctgaagctgtctagcgtgacagccgccgataccgccgtgtactactgcaccagagaggacagcagcaactggcggagtagaggccagggaacactggtcacagttagctctctcgagagcggcggaggcggatctttcgaacagctccagttgcaagagagcggccctggcttggtaaaaccttccgagacccttagcctcacatgcacggttagtgggggcagcatttcctcaggtgattactattggggatggattcggcaacccccgggtaaaggattggagtggattggtcatatttattatagtggagcgacgtactacaacccaagtctcaaatccagggttacaatatccgtcgatacgagcaggaaccaattcagcttgaaactttctagtgtcaccgcagcagacacagccgtctattactgtacgcgggatgactccagtaattggcggtcccgagggcaagggacactggtcacggtctcctcaacgcgtgcctctacaaagggaccctccgtgtttcctctggctcccagcagcaagtctacaagcggaggaacagccgctctgggctgcctggtcaaggattactttcccgagcctgtgaccgtgtcctggaatagcggagcactgacaagcggcgtgcacacctttccagccgtgctgcaaagcagcggcctgtactctctgagcagcgtggtcacagtgcctagctctagcctgggcacccagacctacatctgcaatgtgaaccacaagcctagcaacaccaaggtggacaagagagtggaacccaagagctgtatccccgaggacacattcttcccaagccccgagagcagctgcgacgtgaagctggtggaaaagagcttcgagacagacaccaacctgaacttccagaacctgagcgtgatcggcttcagaatcctgctgctgaaagtggccggctttaacctgctgatgaccctgcggctgtggtccagccgcgccaagagaagcggatctggcgtgaagcagaccctgaatttcgacctgctgaagctggctggcgacgtggaatccaacccaggcccttctagaggccatatgaccgagtacaagcccacggtgcgcctcgccacccgcgacgacgtccccagggccgtacgcaccctcgccgccgcgttcgccgactaccccgccacgcgccacaccgtcgatccggaccgccacatcgagcgggtcaccgagctgcaagaactcttcctcacgcgcgtcgggctcgacatcggcaaggtgtgggtcgcggacgacggcgccgcggtggcggtctggaccacgccggagagcgtcgaagcgggggcggtgttcgccgagatcggcccgcgcatggccgagttgagcggttcccggctggccgcgcagcaacagatggaaggcctcctggcgccgcaccggcccaaggagcccgcgtggttcctggccaccgtcggcgtctcgcccgaccaccagggcaagggtctgggcagcgccgtcgtgctccccggagtggaggcggccgagcgcgccggggtgcccgccttcctggagacctccgcgccccgcaacctccccttctacgagcggctcggcttcaccgtcaccgccgacgtcgaggtgcccgaaggaccgcgcacctggtgcatgacccgcaagcccggtgcctga

SEQ ID NO: 22083 - DNA, 1032 bp, Artificial Sequence
  Synthetic Polynucleotide
atggccttaccagtgaccgccttgctcctgccgctggccttgctgctccacgccgccaggccgcagctccagctgcaagagtctggacctggcctggtcaagcctagcgagacactgagcctgacctgtaccgtgtccggcgatagcatcagcagcggcgattactactggggctggatcagacagcctcctggcaaaggactggaatggatcggccacatctactacagcggcgtgacctactacaaccccagcctgaagtccagagtgaccatcagcgtggacaccagccggaaccagttctccctgaagctgtctagcgtgacagccgccgataccgccgtgtactactgcaccagagaggacagcagcaactggcggagtagaggccagggaacactggtcacagttagctctctcgagagcggcggaggcggatctttcgaagaggttcagctgcttgagtctggcggaggactggttcaacctggcggaagcctgagactgtcttgtgccgccagcggcttcacctttagcagctacgccatgagctgggtccgacaggctcctggcaaaggactggaatgggtgtccagcatcagcggcagcggcgactacatctactacgccgatagcgtgaagggcagattcaccatcagccgggacatcagcaagaacaccctgtacctccagatgaacagcctgagagccgaggacaccgccgtgtactactgtgccaaagaaggcaccggcgctaacagcagcctggccgattatagaggccagggcacactggtcaccgtgtctagtacgcgtgataaaactcatacctgtccgccatgcccggcaatccccgaggacacattcttcccaagccccgagagcagctgcgacgtgaagctggtggaaaagagcttcgagacagacaccaacctgaacttccagaacctgagcgtgatcggcttcagaatcctgctgctgaaagtggccggctttaacctgctgatgaccctgcggctgtggtccagctaa

SEQ ID NO: 22084 - DNA, 1023 bp, Artificial Sequence
  Synthetic Polynucleotide
atggccttaccagtgaccgccttgctcctgccgctggccttgctgctccacgccgccaggccgcagctccagctgcaagagtctggacctggcctggtcaagcctagcgagacactgagcctgacctgtaccgtgtccggcgatagcatcagcagcggcgattactactggggctggatcagacagcctcctggcaaaggactggaatggatcggccacatctactacagcggcgtgacctactacaaccccagcctgaagtccagagtgaccatcagcgtggacaccagccggaaccagttctccctgaagctgtctagcgtgacagccgccgataccgccgtgtactactgcaccagagaggacagcagcaactggcggagtagaggccagggaacactggtcacagttagctctctcgacagcggcggaggcggatctttcgaacagctccagttgcaagagagcggccctggcttggtaaaaccttccgagacccttagcctcacatgcacggttagtgggggcagcatttcctcaggtgattactattggggatggattcggcaacccccgggtaaaggattggagtggattggtcatatttattatagtggagcgacgtactacaacccaagtctcaaatccagggttacaatatccgtcgatacgagcaggaaccaattcagcttgaaactttctagtgtcaccgcagcagacacagccgtctattactgtacgcgggatgactccagtaattggcggtcccgagggcaagggacactggtcacggtctcctcaacgcgtgataaaactcatacctgtccgccatgcccggcaatccccgaggacacattcttcccaagccccgagagcagctgcgacgtgaagctggtggaaaagagcttcgagacagacaccaacctgaacttccagaacctgagcgtgatcggcttcagaatcctgctgctgaaagtggccggctttaacctgctgatgaccctgcggctgtggtccagctaa

SEQ ID NO: 22085 - DNA, 1698 bp, Artificial Sequence
  Synthetic Polynucleotide
atggccttaccagtgaccgccttgctcctgccgctggccttgctgctccacgccgccaggccgcagctccagctgcaagagtctggacctggcctggtcaagcctagcgagacactgagcctgacctgtaccgtgtccggcgatagcatcagcagcggcgattactactggggctggatcagacagcctcctggcaaaggactggaatggatcggccacatctactacagcggcgtgacctactacaaccccagcctgaagtccagagtgaccatcagcgtggacaccagccggaaccagttctccctgaagctgtctagcgtgacagccgccgataccgccgtgtactactgcaccagagaggacagcagcaactggcggagtagaggccagggaacactggtcacagttagctctctcgagggctcaggcggaggcggaagtggaggcggaggcagtggcgaggacctgaagaacgtgttcccacctgaggtggccgtgttcgagcctagcgaggccgagatcagccacacccagaaagccaccctcgtgtgcctggctaccggcttctaccccgaccatgtggaactgtcttggtgggtcaacggcaaagaggtgcacagcggcgtgtgtaccgacccccagccactgaaagaacagcccgccctgaacgacagccggtactgcctgagcagcagactgagagtgtccgccaccttctggcagaacccccggaaccacttcagatgccaggtgcagttctacggcctgagcgagaacgacgagtggacccaggacagagccaagcccgtgacccagatcgtgtctgccgaagcctggggcagagccgattgcggctttaccagcgagagctaccagcagggcgtgctgagcgccaccatcctgtacgagatcctgctgggcaaggccaccctgtacgccgtgctggtgtctgccctggtgctgatggctatggtcaagcggaaggacagccggggaagggccaagcgatctggatctggagcaacaaacttctcactactcaaacaagcaggtgacgtggaggagaatcccgggcctactagtatggactggatttggcgcatccttttccttgtcggcgctgctaccggcgcgcattccttcgaagtgcagctgcttgaaagtggcggcggactgattcagcctggcggatctctgagactgagctgtgccgccagcggcttcaccttttctagccacgccatgacctgggtccgacaggcacctggaaaagggcttgaatgggtgtccgccatcagcggctctggcgattacacacactacgccgacagcgtgaagggcagattcaccatcagcagagacaacagcaagaacaccgtgtacctccagatgaacagcctgagagccgaggacagcgccgtgtattattgcgccaaggatgaggatggcggcagcctgcttggacacagaggacaaggcaccctggtcaccgtttcttccacgcgtggcagcatccccgaggacacattcttcccaagccccgagagcagctgcgacgtgaagctggtggaaaagagcttcgagacagacaccaacctgaacttccagaacctgagcgtgatcggcttcagaatcctgctgctgaaagtggccggctttaacctgctgatgaccctgcggctgtggtccagctaa

SEQ ID NO: 22086 - DNA, 27 bp, Artificial Sequence
  Synthetic Polynucleotide
ggggggggggggggggggggggggggg

SEQ ID NO: 22087 - DNA, 1707 bp, Artificial Sequence
  Synthetic Polynucleotide
atggccttaccagtgaccgccttgctcctgccgctggccttgctgctccacgccgccaggccgcaggtgcagctggttgaatctggcggaggactggttcagcctggcggatctctgagactgtcttgtgccgccagcggcttcaccttcaccaatcacgccatgagctgggtccgacaggcccctggaaaaggactggaactggtgtctagcatcagcggcaacggcagaaccacctactacgccgatagcgtgaagggcagattcaccatcagccgggacatcagcaagaacaccctggacctccagatgaacagcctgagagccgaggataccgccgtgtactactgtgccaaggatggcggagagacactggtggatagcagaggccagggcacactggtcacagtgtcatctctcgagggctcaggcggaggcggaagtggaggcggaggcagtggcgaggacctgaagaacgtgttcccacctgaggtggccgtgttcgagcctagcgaggccgagatcagccacacccagaaagccaccctcgtgtgcctggctaccggcttctaccccgaccatgtggaactgtcttggtgggtcaacggcaaagaggtgcacagcggcgtgtgtaccgacccccagccactgaaagaacagcccgccctgaacgacagccggtactgcctgagcagcagactgagagtgtccgccaccttctggcagaacccccggaaccacttcagatgccaggtgcagttctacggcctgagcgagaacgacgagtggacccaggacagagccaagcccgtgacccagatcgtgtctgccgaagcctggggcagagccgattgcggctttaccagcgagagctaccagcagggcgtgctgagcgccaccatcctgtacgagatcctgctgggcaaggccaccctgtacgccgtgctggtgtctgccctggtgctgatggctatggtcaagcggaaggacagccggggaagggccaagcgatctggatctggagcaacaaacttctcactactcaaacaagcaggtgacgtggaggagaatcccgggcctactagtatggactggatttggcgcatccttttccttgtcggcgctgctaccggcgcgcattccttcgaagaggttcagctgcttgagtctggcggaggactggttcaacctggcggaagcctgagactgtcttgtgccgccagcggcttcacctttagcagctacgccatgagctgggtccgacaggctcctggcaaaggactggaatgggtgtccagcatcagcggcagcggcgactacatctactacgccgatagcgtgaagggcagattcaccatcagccgggacatcagcaagaacaccctgtacctccagatgaacagcctgagagccgaggacaccgccgtgtactactgtgccaaagaaggcaccggcgctaacagcagcctggccgattatagaggccagggcacactggtcaccgtgtctagtacgcgtggcagcatccccgaggacacattcttcccaagccccgagagcagctgcgacgtgaagctggtggaaaagagcttcgagacagacaccaacctgaacttccagaacctgagcgtgatcggcttcagaatcctgctgctgaaagtggccggctttaacctgctgatgaccctgcggctgtggtccagctaa

SEQ ID NO: 22088 - DNA, 2028 bp, Artificial Sequence
  Synthetic Polynucleotide
atggccttaccagtgaccgccttgctcctgccgctggccttgctgctccacgccgccaggccggacatccagatgacacagactacatcctccctgtctgcctctctgggagacagagtcaccatcagttgcagggcaagtcaggacattagtaaatatttaaattggtatcagcagaaaccagatggaactgttaaactcctgatctaccatacatcaagattacactcaggagtcccatcaaggttcagtggcagtgggtctggaacagattattctctcaccattagcaacctggagcaagaagatattgccacttacttttgccaacagggtaatacgcttccgtacacgttcggaggggggaccaagctggagatcacaggtggcggtggctcgggcggtggtgggtcgggtggcggcggatctgaggtgaaactgcaggagtcaggacctggcctggtggcgccctcacagagcctgtccgtcacatgcactgtctcaggggtctcattacccgactatggtgtaagctggattcgccagcctccacgaaagggtctggagtggctgggagtaatatggggtagtgaaaccacatactataattcagctctcaaatccagactgaccatcatcaaggacaactccaagagccaagttttcttaaaaatgaacagtctgcaaactgatgacacagccatttactactgtgccaaacattattactacggtggtagctatgctatggactactggggtcaaggaacctcagtcaccgtctcctcactcgaggacctgaagaacgtgttcccacctgaggtggccgtgttcgagcctagcgaggccgagatcagccacacccagaaagccaccctcgtgtgcctggctaccggcttctaccccgaccatgtggaactgtcttggtgggtcaacggcaaagaggtgcacagcggcgtgtgtaccgacccccagccactgaaagaacagcccgccctgaacgacagccggtactgcctgagcagcagactgagagtgtccgccaccttctggcagaacccccggaaccacttcagatgccaggtgcagttctacggcctgagcgagaacgacgagtggacccaggacagagccaagcccgtgacccagatcgtgtctgccgaagcctggggcagagccgattgcggctttaccagcgagagctaccagcagggcgtgctgagcgccaccatcctgtacgagatcctgctgggcaaggccaccctgtacgccgtgctggtgtctgccctggtgctgatggctatggtcaagcggaaggacagccggggaagggccaagcgatctggatctggagcaacaaacttctcactactcaaacaagcaggtgacgtggaggagaatcccgggcctactagtatggactggatttggcgcatccttttccttgtcggcgctgctaccggcgcgcattccttcgaagtgcagctgcttgaaagtggcggcggactgattcagcctggcggatctctgagactgagctgtgccgccagcggcttcaccttttctagccacgccatgacctgggtccgacaggcacctggaaaagggcttgaatgggtgtccgccatcagcggctctggcgattacacacactacgccgacagcgtgaagggcagattcaccatcagcagagacaacagcaagaacaccgtgtacctccagatgaacagcctgagagccgaggacagcgccgtgtattattgcgccaaggatgaggatggcggcagcctgcttggacacagaggacaaggcaccctggtcaccgtttcttccacgcgtggcagcatccccgaggacacattcttcccaagccccgagagcagctgcgacgtgaagctggtggaaaagagcttcgagacagacaccaacctgaacttccagaacctgagcgtgatcggcttcagaatcctgctgctgaaagtggccggctttaacctgctgatgaccctgcggctgtggtccagctaa

SEQ ID NO: 22089 - DNA, 2220 bp, Artificial Sequence
  Synthetic Polynucleotide
atggccttaccagtgaccgccttgctcctgccgctggccttgctgctccacgccgccaggccgcagctccagctgcaagagtctggacctggcctggtcaagcctagcgagacactgagcctgacctgtaccgtgtccggcgatagcatcagcagcggcgattactactggggctggatcagacagcctcctggcaaaggactggaatggatcggccacatctactacagcggcgtgacctactacaaccccagcctgaagtccagagtgaccatcagcgtggacaccagccggaaccagttctccctgaagctgtctagcgtgacagccgccgataccgccgtgtactactgcaccagagaggacagcagcaactggcggagtagaggccagggaacactggtcacagttagctctctcgagggatctggcagagccgattgcggctttaccagcgagagctaccagcagggcgtgctgagcgccaccatcctgtacgagatcctgctgggcaaggccaccctgtacgccgtgctggtgtctgccctggtgctgatggctatggtcaagcggaaggacagccggggaagggccaagcgatctggatctggagcaacaaacttctcactactcaaacaagcaggtgacgtggaggagaatcccgggcctactagtatggactggatttggcgcatccttttccttgtcggcgctgctaccggcgcgcattccttcgaagtgcagctgcttgaaagtggcggcggactgattcagcctggcggatctctgagactgagctgtgccgccagcggcttcaccttttctagccacgccatgacctgggtccgacaggcacctggaaaagggcttgaatgggtgtccgccatcagcggctctggcgattacacacactacgccgacagcgtgaagggcagattcaccatcagcagagacaacagcaagaacaccgtgtacctccagatgaacagcctgagagccgaggacagcgccgtgtattattgcgccaaggatgaggatggcggcagcctgcttggacacagaggacaaggcaccctggtcaccgtttcttccacgcgtatccagaaccctgatcctgccgtgtaccagctgcgggatagcaagagcagcgacaagagcgtgtgtctgttcaccgacttcgacagccagaccaacgtgtcccagagcaaggactccgacgtgtacatcaccgataagtgcgtgctggacatgcggagcatggacttcaagagcaactccgccgtggcctggtccaacaagtccgatttcgcctgcgccaacgccttcaacaacagcattatccccgaggacacattcttcccaagccccgagagcagctgcgacgtgaagctggtggaaaagagcttcgagacagacaccaacctgaacttccagaacctgagcgtgatcggcttcagaatcctgctgctgaaagtggccggctttaacctgctgatgaccctgcggctgtggtccagccgcgccaagagaagcggatctggcgtgaagcagaccctgaatttcgacctgctgaagctggctggcgacgtggaatccaacccaggcccttctagaggccatatgaccgagtacaagcccacggtgcgcctcgccacccgcgacgacgtccccagggccgtacgcaccctcgccgccgcgttcgccgactaccccgccacgcgccacaccgtcgatccggaccgccacatcgagcgggtcaccgagctgcaagaactcttcctcacgcgcgtcgggctcgacatcggcaaggtgtgggtcgcggacgacggcgccgcggtggcggtctggaccacgccggagagcgtcgaagcgggggcggtgttcgccgagatcggcccgcgcatggccgagttgagcggttcccggctggccgcgcagcaacagatggaaggcctcctggcgccgcaccggcccaaggagcccgcgtggttcctggccaccgtcggcgtctcgcccgaccaccagggcaagggtctgggcagcgccgtcgtgctccccggagtggaggcggccgagcgcgccggggtgcccgccttcctggagacctccgcgccccgcaacctccccttctacgagcggctcggcttcaccgtcaccgccgacgtcgaggtgcccgaaggaccgcgcacctggtgcatgacccgcaagcccggtgcctga

SEQ ID NO: 22090 - DNA, 2247 bp, Artificial Sequence
  Synthetic Polynucleotide
atggccttaccagtgaccgccttgctcctgccgctggccttgctgctccacgccgccaggccgcagctccagctgcaagagtctggacctggcctggtcaagcctagcgagacactgagcctgacctgtaccgtgtccggcgatagcatcagcagcggcgattactactggggctggatcagacagcctcctggcaaaggactggaatggatcggccacatctactacagcggcgtgacctactacaaccccagcctgaagtccagagtgaccatcagcgtggacaccagccggaaccagttctccctgaagctgtctagcgtgacagccgccgataccgccgtgtactactgcaccagagaggacagcagcaactggcggagtagaggccagggaacactggtcacagttagctctctcgaggacaaaactcacacatgcccaccgtgcccagcaggcagagccgattgcggctttaccagcgagagctaccagcagggcgtgctgagcgccaccatcctgtacgagatcctgctgggcaaggccaccctgtacgccgtgctggtgtctgccctggtgctgatggctatggtcaagcggaaggacagccggggaagggccaagcgatctggatctggagcaacaaacttctcactactcaaacaagcaggtgacgtggaggagaatcccgggcctactagtatggactggatttggcgcatccttttccttgtcggcgctgctaccggcgcgcattccttcgaagtgcagctgcttgaaagtggcggcggactgattcagcctggcggatctctgagactgagctgtgccgccagcggcttcaccttttctagccacgccatgacctgggtccgacaggcacctggaaaagggcttgaatgggtgtccgccatcagcggctctggcgattacacacactacgccgacagcgtgaagggcagattcaccatcagcagagacaacagcaagaacaccgtgtacctccagatgaacagcctgagagccgaggacagcgccgtgtattattgcgccaaggatgaggatggcggcagcctgcttggacacagaggacaaggcaccctggtcaccgtttcttccacgcgtatccagaaccctgatcctgccgtgtaccagctgcgggatagcaagagcagcgacaagagcgtgtgtctgttcaccgacttcgacagccagaccaacgtgtcccagagcaaggactccgacgtgtacatcaccgataagtgcgtgctggacatgcggagcatggacttcaagagcaactccgccgtggcctggtccaacaagtccgatttcgcctgcgccaacgccttcaacaacagcattatccccgaggacacattcttcccaagccccgagagcagctgcgacgtgaagctggtggaaaagagcttcgagacagacaccaacctgaacttccagaacctgagcgtgatcggcttcagaatcctgctgctgaaagtggccggctttaacctgctgatgaccctgcggctgtggtccagccgcgccaagagaagcggatctggcgtgaagcagaccctgaatttcgacctgctgaagctggctggcgacgtggaatccaacccaggcccttctagaggccatatgaccgagtacaagcccacggtgcgcctcgccacccgcgacgacgtccccagggccgtacgcaccctcgccgccgcgttcgccgactaccccgccacgcgccacaccgtcgatccggaccgccacatcgagcgggtcaccgagctgcaagaactcttcctcacgcgcgtcgggctcgacatcggcaaggtgtgggtcgcggacgacggcgccgcggtggcggtctggaccacgccggagagcgtcgaagcgggggcggtgttcgccgagatcggcccgcgcatggccgagttgagcggttcccggctggccgcgcagcaacagatggaaggcctcctggcgccgcaccggcccaaggagcccgcgtggttcctggccaccgtcggcgtctcgcccgaccaccagggcaagggtctgggcagcgccgtcgtgctccccggagtggaggcggccgagcgcgccggggtgcccgccttcctggagacctccgcgccccgcaacctccccttctacgagcggctcggcttcaccgtcaccgccgacgtcgaggtgcccgaaggaccgcgcacctggtgcatgacccgcaagcccggtgcctga

SEQ ID NO: 22091 - DNA, 2589 bp, Artificial Sequence
  Synthetic Polynucleotide
atggccttaccagtgaccgccttgctcctgccgctggccttgctgctccacgccgccaggccgcagctccagctgcaagagtctggacctggcctggtcaagcctagcgagacactgagcctgacctgtaccgtgtccggcgatagcatcagcagcggcgattactactggggctggatcagacagcctcctggcaaaggactggaatggatcggccacatctactacagcggcgtgacctactacaaccccagcctgaagtccagagtgaccatcagcgtggacaccagccggaaccagttctccctgaagctgtctagcgtgacagccgccgataccgccgtgtactactgcaccagagaggacagcagcaactggcggagtagaggccagggaacactggtcacagttagctctctcgaggacctgaagaacgtgttcccacctgaggtggccgtgttcgagcctagcaaggccgagatcgcccacacccagaaagccaccctcgtgtgcctggctaccggcttctaccccgaccatgtggaactgtcttggtgggtcaacggcaaagaggtgcacagcggcgtgtgtaccgacccccagccactgaaagaacagcccgccctgaacgacagccggtactgcctgagcagcagactgagagtgtccgccaccttctggcagaacccccggaaccacttcagatgccaggtgcagttctacggcctgagcgagaacgacgagtggacccaggacagagccaagcccgtgacccagatcgtgtctgccgaagcctggggcagagccgattgcggcatcaccagcgccagctaccaccagggcgtgctgagcgccaccatcctgtacgagatcctgctgggcaaggccaccctgtacgccgtgctggtgtctgccctggtgctgatggctatggtcaagcggaaggacagccggggaagggccaagcgatctggatctggagcaacaaacttctcactactcaaacaagcaggtgacgtggaggagaatcccgggcctactagtatggactggatttggcgcatccttttccttgtcggcgctgctaccggcgcgcattccttcgaagtgcagctgcttgaaagtggcggcggactgattcagcctggcggatctctgagactgagctgtgccgccagcggcttcaccttttctagccacgccatgacctgggtccgacaggcacctggaaaagggcttgaatgggtgtccgccatcagcggctctggcgattacacacactacgccgacagcgtgaagggcagattcaccatcagcagagacaacagcaagaacaccgtgtacctccagatgaacagcctgagagccgaggacagcgccgtgtattattgcgccaaggatgaggatggcggcagcctgcttggacacagaggacaaggcaccctggtcaccgtttcttccacgcgtatccagaaccctgatcctgccgtgtaccagctgcgggatagcaagagcagcgacaagagcgtgtgtctgttcaccgacttcgacagccagaccaacgtgtcccagagcaaggactccgacgtgtacatcaccgataagtgcgtgctggacatgcggagcatggacttcaagagcaactccgccgtggcctggtccaacaagtccgatttcgcctgcgccaacgccttcaacaacagcattatccccgaggacacattcttcccaagccccgagagcagctgcgacgtgaagctggtggaaaagagcttcgagacagacaccaacctgaacttccagaacctgagcgtgatcggcttcagaatcctgctgctgaaagtggccggctttaacctgctgatgaccctgcggctgtggtccagccgcgccaagagaagcggatctggcgtgaagcagaccctgaatttcgacctgctgaagctggctggcgacgtggaatccaacccaggcccttctagaggccatatgaccgagtacaagcccacggtgcgcctcgccacccgcgacgacgtccccagggccgtacgcaccctcgccgccgcgttcgccgactaccccgccacgcgccacaccgtcgatccggaccgccacatcgagcgggtcaccgagctgcaagaactcttcctcacgcgcgtcgggctcgacatcggcaaggtgtgggtcgcggacgacggcgccgcggtggcggtctggaccacgccggagagcgtcgaagcgggggcggtgttcgccgagatcggcccgcgcatggccgagttgagcggttcccggctggccgcgcagcaacagatggaaggcctcctggcgccgcaccggcccaaggagcccgcgtggttcctggccaccgtcggcgtctcgcccgaccaccagggcaagggtctgggcagcgccgtcgtgctccccggagtggaggcggccgagcgcgccggggtgcccgccttcctggagacctccgcgccccgcaacctccccttctacgagcggctcggcttcaccgtcaccgccgacgtcgaggtgcccgaaggaccgcgcacctggtgcatgacccgcaagcccggtgcctga

SEQ ID NO: 22092 - DNA, 2598 bp, Artificial Sequence
  Synthetic Polynucleotide
atggccttaccagtgaccgccttgctcctgccgctggccttgctgctccacgccgccaggccgcaggtgcagctggttgaatctggcggaggactggttcagcctggcggatctctgagactgtcttgtgccgccagcggcttcaccttcaccaatcacgccatgagctgggtccgacaggcccctggaaaaggactggaactggtgtctagcatcagcggcaacggcagaaccacctactacgccgatagcgtgaagggcagattcaccatcagccgggacatcagcaagaacaccctggacctccagatgaacagcctgagagccgaggataccgccgtgtactactgtgccaaggatggcggagagacactggtggatagcagaggccagggcacactggtcacagtgtcatctctcgaggacctgaagaacgtgttcccacctgaggtggccgtgttcgagcctagcaaggccgagatcgcccacacccagaaagccaccctcgtgtgcctggctaccggcttctaccccgaccatgtggaactgtcttggtgggtcaacggcaaagaggtgcacagcggcgtgtgtaccgacccccagccactgaaagaacagcccgccctgaacgacagccggtactgcctgagcagcagactgagagtgtccgccaccttctggcagaacccccggaaccacttcagatgccaggtgcagttctacggcctgagcgagaacgacgagtggacccaggacagagccaagcccgtgacccagatcgtgtctgccgaagcctggggcagagccgattgcggcatcaccagcgccagctaccaccagggcgtgctgagcgccaccatcctgtacgagatcctgctgggcaaggccaccctgtacgccgtgctggtgtctgccctggtgctgatggctatggtcaagcggaaggacagccggggaagggccaagcgatctggatctggagcaacaaacttctcactactcaaacaagcaggtgacgtggaggagaatcccgggcctactagtatggactggatttggcgcatccttttccttgtcggcgctgctaccggcgcgcattccttcgaagaggttcagctgcttgagtctggcggaggactggttcaacctggcggaagcctgagactgtcttgtgccgccagcggcttcacctttagcagctacgccatgagctgggtccgacaggctcctggcaaaggactggaatgggtgtccagcatcagcggcagcggcgactacatctactacgccgatagcgtgaagggcagattcaccatcagccgggacatcagcaagaacaccctgtacctccagatgaacagcctgagagccgaggacaccgccgtgtactactgtgccaaagaaggcaccggcgctaacagcagcctggccgattatagaggccagggcacactggtcaccgtgtctagtacgcgtatccagaaccctgatcctgccgtgtaccagctgcgggatagcaagagcagcgacaagagcgtgtgtctgttcaccgacttcgacagccagaccaacgtgtcccagagcaaggactccgacgtgtacatcaccgataagtgcgtgctggacatgcggagcatggacttcaagagcaactccgccgtggcctggtccaacaagtccgatttcgcctgcgccaacgccttcaacaacagcattatccccgaggacacattcttcccaagccccgagagcagctgcgacgtgaagctggtggaaaagagcttcgagacagacaccaacctgaacttccagaacctgagcgtgatcggcttcagaatcctgctgctgaaagtggccggctttaacctgctgatgaccctgcggctgtggtccagccgcgccaagagaagcggatctggcgtgaagcagaccctgaatttcgacctgctgaagctggctggcgacgtggaatccaacccaggcccttctagaggccatatgaccgagtacaagcccacggtgcgcctcgccacccgcgacgacgtccccagggccgtacgcaccctcgccgccgcgttcgccgactaccccgccacgcgccacaccgtcgatccggaccgccacatcgagcgggtcaccgagctgcaagaactcttcctcacgcgcgtcgggctcgacatcggcaaggtgtgggtcgcggacgacggcgccgcggtggcggtctggaccacgccggagagcgtcgaagcgggggcggtgttcgccgagatcggcccgcgcatggccgagttgagcggttcccggctggccgcgcagcaacagatggaaggcctcctggcgccgcaccggcccaaggagcccgcgtggttcctggccaccgtcggcgtctcgcccgaccaccagggcaagggtctgggcagcgccgtcgtgctccccggagtggaggcggccgagcgcgccggggtgcccgccttcctggagacctccgcgccccgcaacctccccttctacgagcggctcggcttcaccgtcaccgccgacgtcgaggtgcccgaaggaccgcgcacctggtgcatgacccgcaagcccggtgcctga

SEQ ID NO: 22093 - DNA, 3063 bp, Artificial Sequence
  Synthetic Polynucleotide
atggccttaccagtgaccgccttgctcctgccgctggccttgctgctccacgccgccaggccggaggtgcagctggttgaatctggcggaggactggttcagcctggcggatctctgagactgtcttgtgccgccagcggcttcaacatcaaggatacctgtatcggctgggttcgcagagcccctggcaaagaggaagaactggtcgccaaaatctgcaagtacagcggccacaccagatacgccgacagcgtgaagggcagattcaccatcagcgccgacaccagcaagaacaccgcctacctccagatgaacagcctgagagccgaggacaccgccgtgtactattgtgccgctgtgtccgtcagagatgggcactacaattactggggccagggcaccaccgtgaccgtttcttcactcgaggggaaaccaattcccaaccctcttctgggactggattcaaccggcagcggcgaggacctgaagaacgtgttcccacctgaggtggccgtgttcgagcctagcaaggccgagatcgcccacacccagaaagccaccctcgtgtgcctggctaccggcttctaccccgaccatgtggaactgtcttggtgggtcaacggcaaagaggtgcacagcggcgtgtgtaccgacccccagccactgaaagaacagcccgccctgaacgacagccggtactgcctgagcagcagactgagagtgtccgccaccttctggcagaacccccggaaccacttcagatgccaggtgcagttctacggcctgagcgagaacgacgagtggacccaggacagagccaagcccgtgacccagatcgtgtctgccgaagcctggggcagagccgattgcggcatcaccagcgccagctaccaccagggcgtgctgagcgccaccatcctgtacgagatcctgctgggcaaggccaccctgtacgccgtgctggtgtctgccctggtgctgatggctatggtcaagcggaaggacagccggggaagggccaagcgatctggatctggagcaacaaacttctcactactcaaacaagcaggtgacgtggaggagaatcccgggcctactagcaccatggccttaccagtgaccgccttgctcctgccgctggccttgctgctccacgccgccaggccggacatccagatgacacagagccctagcagcctgtctgccagcgtgggagacagagtgaccatcacatgcaaggccagcgaccacatcaacaactggctggcctggtatcagcagaagcctggacaggcccctaagctgctgatctacggcgctaccacactggaaacaggcgtgcccagcagattttctggcagcggctctggcaccgactacaccctgacaatatccagcctccagcctgaggacttcgccacctactactgtcagcagagctggaacaccccttggacattcggccagggcaccaagctggaaatcaagagaggcggaggcggaagtggaggcggaggatctggcggcggaggctctcaagttcagcttcaacagcctggcgctgagctggtcaaacctggcgcttctgtgaagatgagctgcaaagccagcggctacgccttcagcagctactggatcaactggatgaagcagaaacccggccagggactcgaatggatcggccaaatctatcccggcgacggcgacaccaactacaacggcaagttcaagggcagagccacactgaccgccgatacctctagcagcacagcctacatgcagctgagcagcctgaccagcgaagatagcgccgtgtacttctgtgcccggtccatcacaacagtcgtgggctgcgctatggactattggggccagggaacaagcgtgaccgtgtctagtacgcgtgagcagaaactgatctcggaagaggatgggagcggcatccagaaccctgatcctgccgtgtaccagctgcgggatagcaagagcagcgacaagagcgtgtgtctgttcaccgacttcgacagccagaccaacgtgtcccagagcaaggactccgacgtgtacatcaccgataagtgcgtgctggacatgcggagcatggacttcaagagcaactccgccgtggcctggtccaacaagtccgatttcgcctgcgccaacgccttcaacaacagcattatccccgaggacacattcttcccaagcagcgacgtgccctgcgacgtgaagctggtggaaaagagcttcgagacagacaccaacctgaacttccagaacctgagcgtgatcggcttcagaatcctgctgctgaaagtggccggctttaacctgctgatgaccctgcggctgtggtccagccgcgccaagagaagcggatctggcgtgaagcagaccctgaatttcgacctgctgaagctggctggcgacgtggaatccaacccaggcccttctagaggccatatgaccgagtacaagcccacggtgcgcctcgccacccgcgacgacgtccccagggccgtacgcaccctcgccgccgcgttcgccgactaccccgccacgcgccacaccgtcgatccggaccgccacatcgagcgggtcaccgagctgcaagaactcttcctcacgcgcgtcgggctcgacatcggcaaggtgtgggtcgcggacgacggcgccgcggtggcggtctggaccacgccggagagcgtcgaagcgggggcggtgttcgccgagatcggcccgcgcatggccgagttgagcggttcccggctggccgcgcagcaacagatggaaggcctcctggcgccgcaccggcccaaggagcccgcgtggttcctggccaccgtcggcgtctcgcccgaccaccagggcaagggtctgggcagcgccgtcgtgctccccggagtggaggcggccgagcgcgccggggtgcccgccttcctggagacctccgcgccccgcaacctccccttctacgagcggctcggcttcaccgtcaccgccgacgtcgaggtgcccgaaggaccgcgcacctggtgcatgacccgcaagcccggtgcctga

SEQ ID NO: 22094 - DNA, 3453 bp, Artificial Sequence
  Synthetic Polynucleotide
atggccttaccagtgaccgccttgctcctgccgctggccttgctgctccacgccgccaggccggacatccagatgacacagactacatcctccctgtctgcctctctgggagacagagtcaccatcagttgcagggcaagtcaggacattagtaaatatttaaattggtatcagcagaaaccagatggaactgttaaactcctgatctaccatacatcaagattacactcaggagtcccatcaaggttcagtggcagtgggtctggaacagattattctctcaccattagcaacctggagcaagaagatattgccacttacttttgccaacagggtaatacgcttccgtacacgttcggaggggggaccaagctggagatcacaggtggcggtggctcgggcggtggtgggtcgggtggcggcggatctgaggtgaaactgcaggagtcaggacctggcctggtggcgccctcacagagcctgtccgtcacatgcactgtctcaggggtctcattacccgactatggtgtaagctggattcgccagcctccacgaaagggtctggagtggctgggagtaatatggggtagtgaaaccacatactataattcagctctcaaatccagactgaccatcatcaaggacaactccaagagccaagttttcttaaaaatgaacagtctgcaaactgatgacacagccatttactactgtgccaaacattattactacggtggtagctatgctatggactactggggtcaaggaacctcagtcaccgtctcctcactcgaggggaaaccaattcccaaccctcttctgggactggattcaaccggcagcggcgaggacctgaagaacgtgttcccacctgaggtggccgtgttcgagcctagcaaggccgagatcgcccacacccagaaagccaccctcgtgtgcctggctaccggcttctaccccgaccatgtggaactgtcttggtgggtcaacggcaaagaggtgcacagcggcgtgtgtaccgacccccagccactgaaagaacagcccgccctgaacgacagccggtactgcctgagcagcagactgagagtgtccgccaccttctggcagaacccccggaaccacttcagatgccaggtgcagttctacggcctgagcgagaacgacgagtggacccaggacagagccaagcccgtgacccagatcgtgtctgccgaagcctggggcagagccgattgcggcatcaccagcgccagctaccaccagggcgtgctgagcgccaccatcctgtacgagatcctgctgggcaaggccaccctgtacgccgtgctggtgtctgccctggtgctgatggctatggtcaagcggaaggacagccggggaagggccaagcgatctggatctggagcaacaaacttctcactactcaaacaagcaggtgacgtggaggagaatcccgggcctactagtaccatggactggatttggcgcatccttttccttgtcggcgctgctaccggcgcccattccgaggttcagctgcttgagtctggcggaggactggttcaacctggcggaagcctgagactgtcttgtgccgcttccggcttcagcttcagcagctatgccctgagctgggtccgacaggctcctggcaaaggactggaatgggtgtccagcatcggcgagaatgacggcaccaccgattatgccgatgccgtgaagggcagattcaccatctctcgggacaacagcaagaacaccctgtacctccagatgaacagcctcagagtggaagataccgccgtgtactactgcgtgaaggacggcgttcactggggccagggaacactggttacagtgtctagcggatccggcggaggcggaagtggaggcggaggatctttcgaagttcagttggtagagtctggaggcggagtggtacaaccggggcggtctcttagacttagttgcgcagcaagcggtttctctttctctggctatgggatgcactgggtgagacaggcccctgggaaaggactggagtgggtggcctacatttcatacgacgggagtaataaatactatgcagactccgttaagggcaggttcacgatctctcgggacaattccaagaatacattgtatcttcagatgaatagtctccgagctgaagacacggcggtttactactgcgctaaagacccggcctggggacttcgacttggagagagttctagctacgattttgacatttggggacaagggacaatggtcactgtctcaagtacgcgtgagcagaaactgatctcggaagaggatgggagcggcatccagaaccctgatcctgccgtgtaccagctgcgggatagcaagagcagcgacaagagcgtgtgtctgttcaccgacttcgacagccagaccaacgtgtcccagagcaaggactccgacgtgtacatcaccgataagtgcgtgctggacatgcggagcatggacttcaagagcaactccgccgtggcctggtccaacaagtccgatttcgcctgcgccaacgccttcaacaacagcattatccccgaggacacattcttcccaagcagcgacgtgccctgcgacgtgaagctggtggaaaagagcttcgagacagacaccaacctgaacttccagaacctgagcgtgatcggcttcagaatcctgctgctgaaagtggccggctttaacctgctgatgaccctgcggctgtggtccagccgcgccaagagaagcggatctggcgtgaagcagaccctgaatttcgacctgctgaagctggctggcgacgtggaatccaacccaggcccttctagaggccatatgaccgagtacaagcccacggtgcgcctcgccacccgcgacgacgtccccagggccgtacgcaccctcgccgccgcgttcgccgactaccccgccacgcgccacaccgtcgatccggaccgccacatcgagcgggtcaccgagctgcaagaactcttcctcacgcgcgtcgggctcgacatcggcaaggtgtgggtcgcggacgacggcgccgcggtggcggtctggaccacgccggagagcgtcgaagcgggggcggtgttcgccgagatcggcccgcgcatggccgagttgagcggttcccggctggccgcgcagcaacagatggaaggcctcctggcgccgcaccggcccaaggagcccgcgtggttcctggccaccgtcggcgtctcgcccgaccaccagggcaagggtctgggcagcgccgtcgtgctccccggagtggaggcggccgagcgcgccggggtgcccgccttcctggagacctccgcgccccgcaacctccccttctacgagcggctcggcttcaccgtcaccgccgacgtcgaggtgcccgaaggaccgcgcacctggtgcatgacccgcaagcccggtgcctga

SEQ ID NO: 22095 - DNA, 2961 bp, Artificial Sequence
  Synthetic Polynucleotide
atggccttaccagtgaccgccttgctcctgccgctggccttgctgctccacgccgccaggccggacatccagatgacacagactacatcctccctgtctgcctctctgggagacagagtcaccatcagttgcagggcaagtcaggacattagtaaatatttaaattggtatcagcagaaaccagatggaactgttaaactcctgatctaccatacatcaagattacactcaggagtcccatcaaggttcagtggcagtgggtctggaacagattattctctcaccattagcaacctggagcaagaagatattgccacttacttttgccaacagggtaatacgcttccgtacacgttcggaggggggaccaagctggagatcacaggtggcggtggctcgggcggtggtgggtcgggtggcggcggatctgaggtgaaactgcaggagtcaggacctggcctggtggcgccctcacagagcctgtccgtcacatgcactgtctcaggggtctcattacccgactatggtgtaagctggattcgccagcctccacgaaagggtctggagtggctgggagtaatatggggtagtgaaaccacatactataattcagctctcaaatccagactgaccatcatcaaggacaactccaagagccaagttttcttaaaaatgaacagtctgcaaactgatgacacagccatttactactgtgccaaacattattactacggtggtagctatgctatggactactggggtcaaggaacctcagtcaccgtctcctcactcgaggacctgaagaacgtgttcccacctgaggtggccgtgttcgagcctagcgaggccgagatcagccacacccagaaagccaccctcgtgtgcctggctaccggcttctaccccgaccatgtggaactgtcttggtgggtcaacggcaaagaggtgcacagcggcgtgtgtaccgacccccagccactgaaagaacagcccgccctgaacgacagccggtactgcctgagcagcagactgagagtgtccgccaccttctggcagaacccccggaaccacttcagatgccaggtgcagttctacggcctgagcgagaacgacgagtggacccaggacagagccaagcccgtgacccagatcgtgtctgccgaagcctggggcagagccgattgcggctttaccagcgagagctaccagcagggcgtgctgagcgccaccatcctgtacgagatcctgctgggcaaggccaccctgtacgccgtgctggtgtctgccctggtgctgatggctatggtcaagcggaaggacagccggggaagggccaagcgatctggatctggagcaacaaacttctcactactcaaacaagcaggtgacgtggaggagaatcccgggcctactagtatggactggatttggcgcatccttttccttgtcggcgctgctaccggcgcgcattccttcgaagtgcagctgcttgaaagtggcggcggactgattcagcctggcggatctctgagactgagctgtgccgccagcggcttcaccttttctagccacgccatgacctgggtccgacaggcacctggaaaagggcttgaatgggtgtccgccatcagcggctctggcgattacacacactacgccgacagcgtgaagggcagattcaccatcagcagagacaacagcaagaacaccgtgtacctccagatgaacagcctgagagccgaggacagcgccgtgtattattgcgccaaggatgaggatggcggcagcctgcttggacacagaggacaaggcaccctggtcaccgtttcttccacgcgtatccagaaccctgatcctgccgtgtaccagctgcgggatagcaagagcagcgacaagagcgtgtgtctgttcaccgacttcgacagccagaccaacgtgtcccagagcaaggactccgacgtgtacatcaccgataagtgcgtgctggacatgcggagcatggacttcaagagcaactccgccgtggcctggtccaacaagtccgatttcgcctgcgccaacgccttcaacaacagcattatccccgaggacacattcttcccaagccccgagagcagctgcgacgtgaagctggtggaaaagagcttcgagacagacaccaacctgaacttccagaacctgagcgtgatcggcttcagaatcctgctgctgaaagtggccggctttaacctgctgatgaccctgcggctgtggtccagccgcgccaagagaagcggatctggcgtgaagcagaccctgaatttcgacctgctgaagctggctggcgacgtggaatccaacccaggcccttctagaggccatatgaccgagtacaagcccacggtgcgcctcgccacccgcgacgacgtccccagggccgtacgcaccctcgccgccgcgttcgccgactaccccgccacgcgccacaccgtcgatccggaccgccacatcgagcgggtcaccgagctgcaagaactcttcctcacgcgcgtcgggctcgacatcggcaaggtgtgggtcgcggacgacggcgccgcggtggcggtctggaccacgccggagagcgtcgaagcgggggcggtgttcgccgagatcggcccgcgcatggccgagttgagcggttcccggctggccgcgcagcaacagatggaaggcctcctggcgccgcaccggcccaaggagcccgcgtggttcctggccaccgtcggcgtctcgcccgaccaccagggcaagggtctgggcagcgccgtcgtgctccccggagtggaggcggccgagcgcgccggggtgcccgccttcctggagacctccgcgccccgcaacctccccttctacgagcggctcggcttcaccgtcaccgccgacgtcgaggtgcccgaaggaccgcgcacctggtgcatgacccgcaagcccggtgcctga

SEQ ID NO: 22096 - DNA, 2667 bp, Artificial Sequence; identical to SEQ ID NO: 6821
  Synthetic Polynucleotide

SEQ ID NO: 22097 - DNA, 2601 bp, Artificial Sequence; identical to SEQ ID NO: 6812
  Synthetic Polynucleotide

SEQ ID NO: 22098 - DNA, 2676 bp, Artificial Sequence; identical to SEQ ID NO: 22048
  Synthetic Polynucleotide

SEQ ID NO: 22099 - DNA, 2610 bp, Artificial Sequence
  Synthetic Polynucleotide
atggccttaccagtgaccgccttgctcctgccgctggccttgctgctccacgccgccaggccgcaggtgcagctggttgaatctggcggaggactggttcagcctggcggatctctgagactgtcttgtgccgccagcggcttcaccttcaccaatcacgccatgagctgggtccgacaggcccctggaaaaggactggaactggtgtctagcatcagcggcaacggcagaaccacctactacgccgatagcgtgaagggcagattcaccatcagccgggacatcagcaagaacaccctggacctccagatgaacagcctgagagccgaggataccgccgtgtactactgtgccaaggatggcggagagacactggtggatagcagaggccagggcacactggtcacagtgtcatctctcgagggacagcctaaggccaatcctaccgtgacactgttccctccaagcagcgaagaactccaggccaacaaggccacacttgtgtgcctgatctccgacttctaccctggggctgtgacagtggcttggaaggccgatggatctcctgtgaaagccggcgtggaaaccaccaagccatccaagcagagcaacaacaaatacgccgccagctcctacctgagcctgacacctgagcagtggaagtcccacagatcctacagctgccaagtgacccacgaaggcagcaccgtggaaaagacagtggcccctacagagtgcagcggcagagccgattgcggctttaccagcgagagctaccagcagggcgtgctgagcgccaccatcctgtacgagatcctgctgggcaaggccaccctgtacgccgtgctggtgtctgccctggtgctgatggctatggtcaagcggaaggacagccggggaagggccaagcgatctggatctggagcaacaaacttctcactactcaaacaagcaggtgacgtggaggagaatcccgggcctactagtatggactggatttggcgcatccttttccttgtcggcgctgctaccggcgcgcattccttcgaagaggttcagctgcttgagtctggcggaggactggttcaacctggcggaagcctgagactgtcttgtgccgccagcggcttcacctttagcagctacgccatgagctgggtccgacaggctcctggcaaaggactggaatgggtgtccagcatcagcggcagcggcgactacatctactacgccgatagcgtgaagggcagattcaccatcagccgggacatcagcaagaacaccctgtacctccagatgaacagcctgagagccgaggacaccgccgtgtactactgtgccaaagaaggcaccggcgctaacagcagcctggccgattatagaggccagggcacactggtcaccgtgtctagtacgcgtgcctctacaaagggaccctccgtgtttcctctggctcccagcagcaagtctacaagcggaggaacagccgctctgggctgcctggtcaaggattactttcccgagcctgtgaccgtgtcctggaatagcggagcactgacaagcggcgtgcacacctttccagccgtgctgcaaagcagcggcctgtactctctgagcagcgtggtcacagtgcctagctctagcctgggcacccagacctacatctgcaatgtgaaccacaagcctagcaacaccaaggtggacaagagagtggaacccaagagctgtatccccgaggacacattcttcccaagccccgagagcagctgcgacgtgaagctggtggaaaagagcttcgagacagacaccaacctgaacttccagaacctgagcgtgatcggcttcagaatcctgctgctgaaagtggccggctttaacctgctgatgaccctgcggctgtggtccagccgcgccaagagaagcggatctggcgtgaagcagaccctgaatttcgacctgctgaagctggctggcgacgtggaatccaacccaggcccttctagaggccatatgaccgagtacaagcccacggtgcgcctcgccacccgcgacgacgtccccagggccgtacgcaccctcgccgccgcgttcgccgactaccccgccacgcgccacaccgtcgatccggaccgccacatcgagcgggtcaccgagctgcaagaactcttcctcacgcgcgtcgggctcgacatcggcaaggtgtgggtcgcggacgacggcgccgcggtggcggtctggaccacgccggagagcgtcgaagcgggggcggtgttcgccgagatcggcccgcgcatggccgagttgagcggttcccggctggccgcgcagcaacagatggaaggcctcctggcgccgcaccggcccaaggagcccgcgtggttcctggccaccgtcggcgtctcgcccgaccaccagggcaagggtctgggcagcgccgtcgtgctccccggagtggaggcggccgagcgcgccggggtgcccgccttcctggagacctccgcgccccgcaacctccccttctacgagcggctcggcttcaccgtcaccgccgacgtcgaggtgcccgaaggaccgcgcacctggtgcatgacccgcaagcccggtgcctga

SEQ ID NO: 22100 - DNA, 27 bp, Artificial Sequence
  Synthetic Polynucleotide
ggggggggggggggggggggggggggg

SEQ ID NO: 22101 - DNA, 2559 bp, Artificial Sequence
  Synthetic Polynucleotide
atggccttaccagtgaccgccttgctcctgccgctggccttgctgctccacgccgccaggccggacatccagatgacacagactacatcctcactgtctgcctctctgggagacagagtcaccatcagttgcagggcaagtcaggacattagtaagtacctgaactggtatcagcagaaaccagatggaactgttaaactcctgatctaccatacatcaagattacactcaggagtcccatcaaggttcagtggcagtgggtctggaacagattattctctcaccattagcaacctggagcaagaagatattgccacttacttttgccaacagggtaatacgcttccgtacacgttcggaggggggaccaagctggagatcacactcgaggacctgaagaacgtgttcccacctgaggtggccgtgttcgagcctagcgaggccgagatcagccacacccagaaagccaccctcgtgtgcctggctaccggcttctaccccgaccatgtggaactgtcttggtgggtcaacggcaaagaggtgcacagcggcgtgtgtaccgacccccagccactgaaagaacagcccgccctgaacgacagccggtactgcctgagcagcagactgagagtgtccgccaccttctggcagaacccccggaaccacttcagatgccaggtgcagttctacggcctgagcgagaacgacgagtggacccaggacagagccaagcccgtgacccagatcgtgtctgccgaagcctggggcagagccgattgcggctttaccagcgagagctaccagcagggcgtgctgagcgccaccatcctgtacgagatcctgctgggcaaggccaccctgtacgccgtgctggtgtctgccctggtgctgatggctatggtcaagcggaaggacagccggggaagggccaagcgatctggatctggagcaacaaacttctcactactcaaacaagcaggtgacgtggaggagaatcccgggcctactagtatggactggatttggcgcatccttttccttgtcggcgctgctaccggcgcgcattccttcgaagtgaaactgcaggagtcaggacctggcctggtggcgccctcacagagcctgtccgtcacatgcactgtctcaggggtctcattacccgactatggtgtaagctggattcgccagcctccacgaaagggtctggagtggctgggagtaatatggggtagtgaaaccacatactataattcagctctcaaatccagactgaccatcatcaaggacaactccaagagccaagttttcttaaaaatgaacagtctgcaaactgatgacacagccatttactactgtgccaaacattattactacggtggtagctatgctatggactactggggccaaggaacctcagtcaccgtctcctcaacgcgtatccagaaccctgatcctgccgtgtaccagctgcgggatagcaagagcagcgacaagagcgtgtgtctgttcaccgacttcgacagccagaccaacgtgtcccagagcaaggactccgacgtgtacatcaccgataagtgcgtgctggacatgcggagcatggacttcaagagcaactccgccgtggcctggtccaacaagtccgatttcgcctgcgccaacgccttcaacaacagcattatccccgaggacacattcttcccaagccccgagagcagctgcgacgtgaagctggtggaaaagagcttcgagacagacaccaacctgaacttccagaacctgagcgtgatcggcttcagaatcctgctgctgaaagtggccggctttaacctgctgatgaccctgcggctgtggtccagccgcgccaagagaagcggatctggcgtgaagcagaccctgaatttcgacctgctgaagctggctggcgacgtggaatccaacccaggcccttctagaggccatatgaccgagtacaagcccacggtgcgcctcgccacccgcgacgacgtccccagggccgtacgcaccctcgccgccgcgttcgccgactaccccgccacgcgccacaccgtcgatccggaccgccacatcgagcgggtcaccgagctgcaagaactcttcctcacgcgcgtcgggctcgacatcggcaaggtgtgggtcgcggacgacggcgccgcggtggcggtctggaccacgccggagagcgtcgaagcgggggcggtgttcgccgagatcggcccgcgcatggccgagttgagcggttcccggctggccgcgcagcaacagatggaaggcctcctggcgccgcaccggcccaaggagcccgcgtggttcctggccaccgtcggcgtctcgcccgaccaccagggcaagggtctgggcagcgccgtcgtgctccccggagtggaggcggccgagcgcgccggggtgcccgccttcctggagacctccgcgccccgcaacctccccttctacgagcggctcggcttcaccgtcaccgccgacgtcgaggtgcccgaaggaccgcgcacctggtgcatgacccgcaagcccggtgcctga

SEQ ID NO: 22102 - DNA, 2559 bp, Artificial Sequence
  Synthetic Polynucleotide
atggccttaccagtgaccgccttgctcctgccgctggccttgctgctccacgccgccaggccggacatccagatgacacagactacatcctcactgtctgcctctctgggagacagagtcaccatcagttgcagggcaagtcaggacattagtaagtacctgaactggtatcagcagaaaccagatggaactgttaaactcctgatctaccatacatcaagattacactcaggagtcccatcaaggttcagtggcagtgggtctggaacagattattctctcaccattagcaacctggagcaagaagatattgccacttacttttgccaacagggtaatacgcttccgtacacgttcggaggggggaccaagctggagatcacactcgaggacctgaagaacgtgttcccacctgaggtggccgtgttcgagcctagcaaggccgagatcgcccacacccagaaagccaccctcgtgtgcctggctaccggcttctaccccgaccatgtggaactgtcttggtgggtcaacggcaaagaggtgcacagcggcgtgtgtaccgacccccagccactgaaagaacagcccgccctgaacgacagccggtactgcctgagcagcagactgagagtgtccgccaccttctggcagaacccccggaaccacttcagatgccaggtgcagttctacggcctgagcgagaacgacgagtggacccaggacagagccaagcccgtgacccagatcgtgtctgccgaagcctggggcagagccgattgcggcatcaccagcgccagctaccaccagggcgtgctgagcgccaccatcctgtacgagatcctgctgggcaaggccaccctgtacgccgtgctggtgtctgccctggtgctgatggctatggtcaagcggaaggacagccggggaagggccaagcgatctggatctggagcaacaaacttctcactactcaaacaagcaggtgacgtggaggagaatcccgggcctactagtatggactggatttggcgcatccttttccttgtcggcgctgctaccggcgcgcattccttcgaagtgaaactgcaggagtcaggacctggcctggtggcgccctcacagagcctgtccgtcacatgcactgtctcaggggtctcattacccgactatggtgtaagctggattcgccagcctccacgaaagggtctggagtggctgggagtaatatggggtagtgaaaccacatactataattcagctctcaaatccagactgaccatcatcaaggacaactccaagagccaagttttcttaaaaatgaacagtctgcaaactgatgacacagccatttactactgtgccaaacattattactacggtggtagctatgctatggactactggggccaaggaacctcagtcaccgtctcctcaacgcgtatccagaaccctgatcctgccgtgtaccagctgcgggatagcaagagcagcgacaagagcgtgtgtctgttcaccgacttcgacagccagaccaacgtgtcccagagcaaggactccgacgtgtacatcaccgataagtgcgtgctggacatgcggagcatggacttcaagagcaactccgccgtggcctggtccaacaagtccgatttcgcctgcgccaacgccttcaacaacagcattatccccgaggacacattcttcccaagcagcgacgtgccctgcgacgtgaagctggtggaaaagagcttcgagacagacaccaacctgaacttccagaacctgagcgtgatcggcttcagaatcctgctgctgaaagtggccggctttaacctgctgatgaccctgcggctgtggtccagccgcgccaagagaagcggatctggcgtgaagcagaccctgaatttcgacctgctgaagctggctggcgacgtggaatccaacccaggcccttctagaggccatatgaccgagtacaagcccacggtgcgcctcgccacccgcgacgacgtccccagggccgtacgcaccctcgccgccgcgttcgccgactaccccgccacgcgccacaccgtcgatccggaccgccacatcgagcgggtcaccgagctgcaagaactcttcctcacgcgcgtcgggctcgacatcggcaaggtgtgggtcgcggacgacggcgccgcggtggcggtctggaccacgccggagagcgtcgaagcgggggcggtgttcgccgagatcggcccgcgcatggccgagttgagcggttcccggctggccgcgcagcaacagatggaaggcctcctggcgccgcaccggcccaaggagcccgcgtggttcctggccaccgtcggcgtctcgcccgaccaccagggcaagggtctgggcagcgccgtcgtgctccccggagtggaggcggccgagcgcgccggggtgcccgccttcctggagacctccgcgccccgcaacctccccttctacgagcggctcggcttcaccgtcaccgccgacgtcgaggtgcccgaaggaccgcgcacctggtgcatgacccgcaagcccggtgcctga

SEQ ID NO: 22103 - DNA, 2646 bp, Artificial Sequence
  Synthetic Polynucleotide
atggccttaccagtgaccgccttgctcctgccgctggccttgctgctccacgccgccaggccggacatccagatgacacagagccctagcagcctgtctgccagcgtgggagacagagtgaccatcacatgcaaggccagcgaccacatcaacaactggctggcctggtatcagcagaagcctggacaggcccctaagctgctgatctacggcgctaccacactggaaacaggcgtgcccagcagattttctggcagcggctctggcaccgactacaccctgacaatatccagcctccagcctgaggacttcgccacctactactgtcagcagagctggaacaccccttggacattcggccagggcaccaagctggaaatcaagagactcgagggacagcctaaggccaatcctaccgtgacactgttccctccaagcagcgaagaactccaggccaacaaggccacacttgtgtgcctgatctccgacttctaccctggggctgtgacagtggcttggaaggccgatggatctcctgtgaaagccggcgtggaaaccaccaagccatccaagcagagcaacaacaaatacgccgccagctcctacctgagcctgacacctgagcagtggaagtcccacagatcctacagctgccaagtgacccacgaaggcagcaccgtggaaaagacagtggcccctacagagtgcagccccatcaagaccgatgtgattacaatggaccccaaggacaactgctccaaggacgccaacgataccctgctgctccagctgaccaacaccagcgcctactacatgtacttgttgctgctgctgaagtccgtggtgtacttcgccatcatcacatgctgcctgctgcggagaaccgccttctgctgcaacggcgagaagtctagggccaagcgatctggatctggagcaacaaacttctcactactcaaacaagcaggtgacgtggaggagaatcccgggcctactagtatggactggatttggcgcatccttttccttgtcggcgctgctaccggcgcgcattccttcgaacaagttcagcttcaacagcctggcgctgagctggtcaaacctggcgcttctgtgaagatgagctgcaaagccagcggctacgccttcagcagctactggatcaactggatgaagcagaaacccggccagggactcgaatggatcggccaaatctatcccggcgacggcgacaccaactacaacggcaagttcaagggcagagccacactgaccgccgatacctctagcagcacagcctacatgcagctgagcagcctgaccagcgaagatagcgccgtgtacttctgtgcccggtccatcacaacagtcgtgggctgcgctatggactattggggccagggaacaagcgtgaccgtgtctagtacgcgtgcctctacaaagggaccctccgtgtttcctctggctcccagcagcaagtctacaagcggaggaacagccgctctgggctgcctggtcaaggattactttcccgagcctgtgaccgtgtcctggaatagcggagcactgacaagcggcgtgcacacctttccagccgtgctgcaaagcagcggcctgtactctctgagcagcgtggtcacagtgcctagctctagcctgggcacccagacctacatctgcaatgtgaaccacaagcctagcaacaccaaggtggacaagagagtggaacccaagagctgtgaagtgaaaaccgactccaccgaccacgtgaagcccaaagagacagagaacaccaagcagcccagcaagagctgccacaagcccaaggccatcgtgcacaccgagaaagtgaacatgatgagcctgaccgtgctgggcctgcggatgctgttcgccaaaaccgtggccgtgaacttcctgctgaccgccaagctgttcttcctccgcgccaagagaagcggatctggcgtgaagcagaccctgaatttcgacctgctgaagctggctggcgacgtggaatccaacccaggcccttctagaggccatatgaccgagtacaagcccacggtgcgcctcgccacccgcgacgacgtccccagggccgtacgcaccctcgccgccgcgttcgccgactaccccgccacgcgccacaccgtcgatccggaccgccacatcgagcgggtcaccgagctgcaagaactcttcctcacgcgcgtcgggctcgacatcggcaaggtgtgggtcgcggacgacggcgccgcggtggcggtctggaccacgccggagagcgtcgaagcgggggcggtgttcgccgagatcggcccgcgcatggccgagttgagcggttcccggctggccgcgcagcaacagatggaaggcctcctggcgccgcaccggcccaaggagcccgcgtggttcctggccaccgtcggcgtctcgcccgaccaccagggcaagggtctgggcagcgccgtcgtgctccccggagtggaggcggccgagcgcgccggggtgcccgccttcctggagacctccgcgccccgcaacctccccttctacgagcggctcggcttcaccgtcaccgccgacgtcgaggtgcccgaaggaccgcgcacctggtgcatgacccgcaagcccggtgcctga

SEQ ID NO: 22104 - DNA, 2985 bp, Artificial Sequence
  Synthetic Polynucleotide
atggccttaccagtgaccgccttgctcctgccgctggccttgctgctccacgccgccaggccggacatccagatgacacagagccctagcagcctgtctgccagcgtgggagacagagtgaccatcacatgcaaggccagcgaccacatcaacaactggctggcctggtatcagcagaagcctggacaggcccctaagctgctgatctacggcgctaccacactggaaacaggcgtgcccagcagattttctggcagcggctctggcaccgactacaccctgacaatatccagcctccagcctgaggacttcgccacctactactgtcagcagagctggaacaccccttggacattcggccagggcaccaagctggaaatcaagagactcgaggacctgaagaacgtgttcccacctgaggtggccgtgttcgagcctagcgaggccgagatcagccacacccagaaagccaccctcgtgtgcctggctaccggcttctaccccgaccatgtggaactgtcttggtgggtcaacggcaaagaggtgcacagcggcgtgtgtaccgacccccagccactgaaagaacagcccgccctgaacgacagccggtactgcctgagcagcagactgagagtgtccgccaccttctggcagaacccccggaaccacttcagatgccaggtgcagttctacggcctgagcgagaacgacgagtggacccaggacagagccaagcccgtgacccagatcgtgtctgccgaagcctggggcagagccgattgcggctttaccagcgagagctaccagcagggcgtgctgagcgccaccatcctgtacgagatcctgctgggcaaggccaccctgtacgccgtgctggtgtctgccctggtgctgatggctatggtcaagcggaaggacagccggggaagggccaagcgatctggatctggagcaacaaacttctcactactcaaacaagcaggtgacgtggaggagaatcccgggcctactagtgccaccatggactggatttggcgcatccttttccttgtcggcgctgctaccggcgcccattccgggccccaggttcagctgcaagagtctggcggaggacttgctcaagctggcggaagcctgagactgtcttgtgccgcctctggcagaaccttcagcatgggctggtttagacaggcccctggcaaagagagagagttcgtcgccgccatcacatacagcggcggcagcccttactacgcctcttctgtcagaggccggttcaccatcagccgggacaacgccaagaacaccgtgtacctccagatgaacagcctgaagccagaggacaccgccgtgtactactgtgccgccaatccaacctacggcagcgactggaatgccgagaattggggccagggcacccaagtgacagtgtctagtggatccggcggcggaggatctggcggaggcggatctgggggcggaggctctttcgaacaagttcagcttcaacagcctggcgctgagctggtcaaacctggcgcttctgtgaagatgagctgcaaagccagcggctacgccttcagcagctactggatcaactggatgaagcagaaacccggccagggactcgaatggatcggccaaatctatcccggcgacggcgacaccaactacaacggcaagttcaagggcagagccacactgaccgccgatacctctagcagcacagcctacatgcagctgagcagcctgaccagcgaagatagcgccgtgtacttctgtgcccggtccatcacaacagtcgtgggctgcgctatggactattggggccagggaacaagcgtgaccgtgtctagtacgcgtatccagaaccctgatcctgccgtgtaccagctgcgggatagcaagagcagcgacaagagcgtgtgtctgttcaccgacttcgacagccagaccaacgtgtcccagagcaaggactccgacgtgtacatcaccgataagtgcgtgctggacatgcggagcatggacttcaagagcaactccgccgtggcctggtccaacaagtccgatttcgcctgcgccaacgccttcaacaacagcattatccccgaggacacattcttcccaagccccgagagcagctgcgacgtgaagctggtggaaaagagcttcgagacagacaccaacctgaacttccagaacctgagcgtgatcggcttcagaatcctgctgctgaaagtggccggctttaacctgctgatgaccctgcggctgtggtccagccgcgccaagagaagcggatctggcgtgaagcagaccctgaatttcgacctgctgaagctggctggcgacgtggaatccaacccaggcccttctagaggccatatgaccgagtacaagcccacggtgcgcctcgccacccgcgacgacgtccccagggccgtacgcaccctcgccgccgcgttcgccgactaccccgccacgcgccacaccgtcgatccggaccgccacatcgagcgggtcaccgagctgcaagaactcttcctcacgcgcgtcgggctcgacatcggcaaggtgtgggtcgcggacgacggcgccgcggtggcggtctggaccacgccggagagcgtcgaagcgggggcggtgttcgccgagatcggcccgcgcatggccgagttgagcggttcccggctggccgcgcagcaacagatggaaggcctcctggcgccgcaccggcccaaggagcccgcgtggttcctggccaccgtcggcgtctcgcccgaccaccagggcaagggtctgggcagcgccgtcgtgctccccggagtggaggcggccgagcgcgccggggtgcccgccttcctggagacctccgcgccccgcaacctccccttctacgagcggctcggcttcaccgtcaccgccgacgtcgaggtgcccgaaggaccgcgcacctggtgcatgacccgcaagcccggtgcctga

SEQ ID NO: 22105 - DNA, 2985 bp, Artificial Sequence; identical to SEQ ID NO: 22104
  Synthetic Polynucleotide

SEQ ID NO: 22106 - DNA, 2985 bp, Artificial Sequence
  Synthetic Polynucleotide
atggccttaccagtgaccgccttgctcctgccgctggccttgctgctccacgccgccaggccggacatccagatgacacagagccctagcagcctgtctgccagcgtgggagacagagtgaccatcacatgcaaggccagcgaccacatcaacaactggctggcctggtatcagcagaagcctggacaggcccctaagctgctgatctacggcgctaccacactggaaacaggcgtgcccagcagattttctggcagcggctctggcaccgactacaccctgacaatatccagcctccagcctgaggacttcgccacctactactgtcagcagagctggaacaccccttggacattcggccagggcaccaagctggaaatcaagagactcgaggacctgaagaacgtgttcccacctgaggtggccgtgttcgagcctagcaaggccgagatcgcccacacccagaaagccaccctcgtgtgcctggctaccggcttctaccccgaccatgtggaactgtcttggtgggtcaacggcaaagaggtgcacagcggcgtgtgtaccgacccccagccactgaaagaacagcccgccctgaacgacagccggtactgcctgagcagcagactgagagtgtccgccaccttctggcagaacccccggaaccacttcagatgccaggtgcagttctacggcctgagcgagaacgacgagtggacccaggacagagccaagcccgtgacccagatcgtgtctgccgaagcctggggcagagccgattgcggcatcaccagcgccagctaccaccagggcgtgctgagcgccaccatcctgtacgagatcctgctgggcaaggccaccctgtacgccgtgctggtgtctgccctggtgctgatggctatggtcaagcggaaggacagccggggaagggccaagcgatctggatctggagcaacaaacttctcactactcaaacaagcaggtgacgtggaggagaatcccgggcctactagtgccaccatggactggatttggcgcatccttttccttgtcggcgctgctaccggcgcccattccgggccccaggttcagctgcaagagtctggcggaggacttgctcaagctggcggaagcctgagactgtcttgtgccgcctctggcagaaccttcagcatgggctggtttagacaggcccctggcaaagagagagagttcgtcgccgccatcacatacagcggcggcagcccttactacgcctcttctgtcagaggccggttcaccatcagccgggacaacgccaagaacaccgtgtacctccagatgaacagcctgaagccagaggacaccgccgtgtactactgtgccgccaatccaacctacggcagcgactggaatgccgagaattggggccagggcacccaagtgacagtgtctagtggatccggcggcggaggatctggcggaggcggatctgggggcggaggctctttcgaacaagttcagcttcaacagcctggcgctgagctggtcaaacctggcgcttctgtgaagatgagctgcaaagccagcggctacgccttcagcagctactggatcaactggatgaagcagaaacccggccagggactcgaatggatcggccaaatctatcccggcgacggcgacaccaactacaacggcaagttcaagggcagagccacactgaccgccgatacctctagcagcacagcctacatgcagctgagcagcctgaccagcgaagatagcgccgtgtacttctgtgcccggtccatcacaacagtcgtgggctgcgctatggactattggggccagggaacaagcgtgaccgtgtctagtacgcgtatccagaaccctgatcctgccgtgtaccagctgcgggatagcaagagcagcgacaagagcgtgtgtctgttcaccgacttcgacagccagaccaacgtgtcccagagcaaggactccgacgtgtacatcaccgataagtgcgtgctggacatgcggagcatggacttcaagagcaactccgccgtggcctggtccaacaagtccgatttcgcctgcgccaacgccttcaacaacagcattatccccgaggacacattcttcccaagcagcgacgtgccctgcgacgtgaagctggtggaaaagagcttcgagacagacaccaacctgaacttccagaacctgagcgtgatcggcttcagaatcctgctgctgaaagtggccggctttaacctgctgatgaccctgcggctgtggtccagccgcgccaagagaagcggatctggcgtgaagcagaccctgaatttcgacctgctgaagctggctggcgacgtggaatccaacccaggcccttctagaggccatatgaccgagtacaagcccacggtgcgcctcgccacccgcgacgacgtccccagggccgtacgcaccctcgccgccgcgttcgccgactaccccgccacgcgccacaccgtcgatccggaccgccacatcgagcgggtcaccgagctgcaagaactcttcctcacgcgcgtcgggctcgacatcggcaaggtgtgggtcgcggacgacggcgccgcggtggcggtctggaccacgccggagagcgtcgaagcgggggcggtgttcgccgagatcggcccgcgcatggccgagttgagcggttcccggctggccgcgcagcaacagatggaaggcctcctggcgccgcaccggcccaaggagcccgcgtggttcctggccaccgtcggcgtctcgcccgaccaccagggcaagggtctgggcagcgccgtcgtgctccccggagtggaggcggccgagcgcgccggggtgcccgccttcctggagacctccgcgccccgcaacctccccttctacgagcggctcggcttcaccgtcaccgccgacgtcgaggtgcccgaaggaccgcgcacctggtgcatgacccgcaagcccggtgcctga

SEQ ID NO: 22107 - DNA, 2988 bp, Artificial Sequence
  Synthetic Polynucleotide
atggccttaccagtgaccgccttgctcctgccgctggccttgctgctccacgccgccaggccggacatccagatgacacagagccctagcagcctgtctgccagcgtgggagacagagtgaccatcacatgcaaggccagcgaccacatcaacaactggctggcctggtatcagcagaagcctggacaggcccctaagctgctgatctacggcgctaccacactggaaacaggcgtgcccagcagattttctggcagcggctctggcaccgactacaccctgacaatatccagcctccagcctgaggacttcgccacctactactgtcagcagagctggaacaccccttggacattcggccagggcaccaagctggaaatcaagagactcgagatccagaaccctgatcctgccgtgtaccagctgcgggatagcaagagcagcgacaagagcgtgtgtctgttcaccgacttcgacagccagaccaacgtgtcccagagcaaggactccgacgtgtacatcaccgataagtgcgtgctggacatgcggagcatggacttcaagagcaactccgccgtggcctggtccaacaagtccgatttcgcctgcgccaacgccttcaacaacagcattatccccgaggacacattcttcccaagcagcgacgtgccctgcgacgtgaagctggtggaaaagagcttcgagacagacaccaacctgaacttccagaacctgagcgtgatcggcttcagaatcctgctgctgaaagtggccggctttaacctgctgatgaccctgcggctgtggtccagccgcgccaagagaagcggatctggcgtgaagcagaccctgaatttcgacctgctgaagctggctggcgacgtggaatccaacccaggccctactagtgccaccatggactggatttggcgcatccttttccttgtcggcgctgctaccggcgcccattccgggccccaggttcagctgcaagagtctggcggaggacttgctcaagctggcggaagcctgagactgtcttgtgccgcctctggcagaaccttcagcatgggctggtttagacaggcccctggcaaagagagagagttcgtcgccgccatcacatacagcggcggcagcccttactacgcctcttctgtcagaggccggttcaccatcagccgggacaacgccaagaacaccgtgtacctccagatgaacagcctgaagccagaggacaccgccgtgtactactgtgccgccaatccaacctacggcagcgactggaatgccgagaattggggccagggcacccaagtgacagtgtctagtggatccggcggcggaggatctggcggaggcggatctgggggcggaggctctttcgaacaagttcagcttcaacagcctggcgctgagctggtcaaacctggcgcttctgtgaagatgagctgcaaagccagcggctacgccttcagcagctactggatcaactggatgaagcagaaacccggccagggactcgaatggatcggccaaatctatcccggcgacggcgacaccaactacaacggcaagttcaagggcagagccacactgaccgccgatacctctagcagcacagcctacatgcagctgagcagcctgaccagcgaagatagcgccgtgtacttctgtgcccggtccatcacaacagtcgtgggctgcgctatggactattggggccagggaacaagcgtgaccgtgtctagtacgcgtgaggacctgaagaacgtgttcccacctgaggtggccgtgttcgagcctagcaaggccgagatcgcccacacccagaaagccaccctcgtgtgcctggctaccggcttctaccccgaccatgtggaactgtcttggtgggtcaacggcaaagaggtgcacagcggcgtgtgtaccgacccccagccactgaaagaacagcccgccctgaacgacagccggtactgcctgagcagcagactgagagtgtccgccaccttctggcagaacccccggaaccacttcagatgccaggtgcagttctacggcctgagcgagaacgacgagtggacccaggacagagccaagcccgtgacccagatcgtgtctgccgaagcctggggcagagccgattgcggcatcaccagcgccagctaccaccagggcgtgctgagcgccaccatcctgtacgagatcctgctgggcaaggccaccctgtacgccgtgctggtgtctgccctggtgctgatggctatggtcaagcggaaggacagccggggaagggccaagcgatctggatctggagcaacaaacttctcactactcaaacaagcaggtgacgtggaggagaatcccgggccttctagaggccatatgaccgagtacaagcccacggtgcgcctcgccacccgcgacgacgtccccagggccgtacgcaccctcgccgccgcgttcgccgactaccccgccacgcgccacaccgtcgatccggaccgccacatcgagcgggtcaccgagctgcaagaactcttcctcacgcgcgtcgggctcgacatcggcaaggtgtgggtcgcggacgacggcgccgcggtggcggtctggaccacgccggagagcgtcgaagcgggggcggtgttcgccgagatcggcccgcgcatggccgagttgagcggttcccggctggccgcgcagcaacagatggaaggcctcctggcgccgcaccggcccaaggagcccgcgtggttcctggccaccgtcggcgtctcgcccgaccaccagggcaagggtctgggcagcgccgtcgtgctccccggagtggaggcggccgagcgcgccggggtgcccgccttcctggagacctccgcgccccgcaacctccccttctacgagcggctcggcttcaccgtcaccgccgacgtcgaggtgcccgaaggaccgcgcacctggtgcatgacccgcaagcccggtgcctga

SEQ ID NO: 22108 - DNA, 2979 bp, Artificial Sequence
  Synthetic Polynucleotide
atggccttaccagtgaccgccttgctcctgccgctggccttgctgctccacgccgccaggccgcaggtgcagctggttgaatctggcggaggactggttcagcctggcggatctctgagactgtcttgtgccgccagcggcttcaccttcaccaatcacgccatgagctgggtccgacaggcccctggaaaaggactggaactggtgtctagcatcagcggcaacggcagaaccacctactacgccgatagcgtgaagggcagattcaccatcagccgggacatcagcaagaacaccctggacctccagatgaacagcctgagagccgaggataccgccgtgtactactgtgccaaggatggcggagagacactggtggatagcagaggccagggcacactggtcacagtgtcatctggtaccggcggaggcggatctggcggcggaggtagcggtggcggaggatctgaattcgacatccagatgacacagagccctagcagcctgtctgccagcgtgggagacagagtgaccatcacatgcaaggccagcgaccacatcaacaactggctggcctggtatcagcagaagcctggacaggcccctaagctgctgatctacggcgctaccacactggaaacaggcgtgcccagcagattttctggcagcggctctggcaccgactacaccctgacaatatccagcctccagcctgaggacttcgccacctactactgtcagcagagctggaacaccccttggacattcggccagggcaccaagctggaaatcaagagactcgaggacctgaagaacgtgttcccacctgaggtggccgtgttcgagcctagcgaggccgagatcagccacacccagaaagccaccctcgtgtgcctggctaccggcttctaccccgaccatgtggaactgtcttggtgggtcaacggcaaagaggtgcacagcggcgtgtgtaccgacccccagccactgaaagaacagcccgccctgaacgacagccggtactgcctgagcagcagactgagagtgtccgccaccttctggcagaacccccggaaccacttcagatgccaggtgcagttctacggcctgagcgagaacgacgagtggacccaggacagagccaagcccgtgacccagatcgtgtctgccgaagcctggggcagagccgattgcggctttaccagcgagagctaccagcagggcgtgctgagcgccaccatcctgtacgagatcctgctgggcaaggccaccctgtacgccgtgctggtgtctgccctggtgctgatggctatggtcaagcggaaggacagccggggaagggccaagcgatctggatctggagcaacaaacttctcactactcaaacaagcaggtgacgtggaggagaatcccgggcctactagtatggactggatttggcgcatccttttccttgtcggcgctgctaccggcgcgcattccttcgaacaagttcagcttcaacagcctggcgctgagctggtcaaacctggcgcttctgtgaagatgagctgcaaagccagcggctacgccttcagcagctactggatcaactggatgaagcagaaacccggccagggactcgaatggatcggccaaatctatcccggcgacggcgacaccaactacaacggcaagttcaagggcagagccacactgaccgccgatacctctagcagcacagcctacatgcagctgagcagcctgaccagcgaagatagcgccgtgtacttctgtgcccggtccatcacaacagtcgtgggctgcgctatggactattggggccagggaacaagcgtgaccgtgtctagtacgcgtatccagaaccctgatcctgccgtgtaccagctgcgggatagcaagagcagcgacaagagcgtgtgtctgttcaccgacttcgacagccagaccaacgtgtcccagagcaaggactccgacgtgtacatcaccgataagtgcgtgctggacatgcggagcatggacttcaagagcaactccgccgtggcctggtccaacaagtccgatttcgcctgcgccaacgccttcaacaacagcattatccccgaggacacattcttcccaagccccgagagcagctgcgacgtgaagctggtggaaaagagcttcgagacagacaccaacctgaacttccagaacctgagcgtgatcggcttcagaatcctgctgctgaaagtggccggctttaacctgctgatgaccctgcggctgtggtccagccgcgccaagagaagcggatctggcgtgaagcagaccctgaatttcgacctgctgaagctggctggcgacgtggaatccaacccaggcccttctagaggccatatgaccgagtacaagcccacggtgcgcctcgccacccgcgacgacgtccccagggccgtacgcaccctcgccgccgcgttcgccgactaccccgccacgcgccacaccgtcgatccggaccgccacatcgagcgggtcaccgagctgcaagaactcttcctcacgcgcgtcgggctcgacatcggcaaggtgtgggtcgcggacgacggcgccgcggtggcggtctggaccacgccggagagcgtcgaagcgggggcggtgttcgccgagatcggcccgcgcatggccgagttgagcggttcccggctggccgcgcagcaacagatggaaggcctcctggcgccgcaccggcccaaggagcccgcgtggttcctggccaccgtcggcgtctcgcccgaccaccagggcaagggtctgggcagcgccgtcgtgctccccggagtggaggcggccgagcgcgccggggtgcccgccttcctggagacctccgcgccccgcaacctccccttctacgagcggctcggcttcaccgtcaccgccgacgtcgaggtgcccgaaggaccgcgcacctggtgcatgacccgcaagcccggtgcctga

SEQ ID NO: 22109 - DNA, 2895 bp, Artificial Sequence
  Synthetic Polynucleotide
atggccttaccagtgaccgccttgctcctgccgctggccttgctgctccacgccgccaggccgatgctgcccgctcctaagaatctggtggtgtccagaatcaccgaggacagcgccagactgtcttggacagctcctgatgccgccttcgacagcttccccatccggtacatcgagacactgatctggggcgaagccatctggctggatgtgcctggaagcgagagaagctacgacctgaccggactgaagcctggcacagagtatgccgtggtcatcaccggcgtgaaaggcggcagattctctagccctctggtggcctctttcaccaccggtaccggcggaggcggatctggcggcggaggtagcggtggcggaggatctgaattcgacatccagatgacacagagccctagcagcctgtctgccagcgtgggagacagagtgaccatcacatgcaaggccagcgaccacatcaacaactggctggcctggtatcagcagaagcctggacaggcccctaagctgctgatctacggcgctaccacactggaaacaggcgtgcccagcagattttctggcagcggctctggcaccgactacaccctgacaatatccagcctccagcctgaggacttcgccacctactactgtcagcagagctggaacaccccttggacattcggccagggcaccaagctggaaatcaagagactcgaggacctgaagaacgtgttcccacctgaggtggccgtgttcgagcctagcgaggccgagatcagccacacccagaaagccaccctcgtgtgcctggctaccggcttctaccccgaccatgtggaactgtcttggtgggtcaacggcaaagaggtgcacagcggcgtgtgtaccgacccccagccactgaaagaacagcccgccctgaacgacagccggtactgcctgagcagcagactgagagtgtccgccaccttctggcagaacccccggaaccacttcagatgccaggtgcagttctacggcctgagcgagaacgacgagtggacccaggacagagccaagcccgtgacccagatcgtgtctgccgaagcctggggcagagccgattgcggctttaccagcgagagctaccagcagggcgtgctgagcgccaccatcctgtacgagatcctgctgggcaaggccaccctgtacgccgtgctggtgtctgccctggtgctgatggctatggtcaagcggaaggacagccggggaagggccaagcgatctggatctggagcaacaaacttctcactactcaaacaagcaggtgacgtggaggagaatcccgggcctactagtatggactggatttggcgcatccttttccttgtcggcgctgctaccggcgcgcattccttcgaacaagttcagcttcaacagcctggcgctgagctggtcaaacctggcgcttctgtgaagatgagctgcaaagccagcggctacgccttcagcagctactggatcaactggatgaagcagaaacccggccagggactcgaatggatcggccaaatctatcccggcgacggcgacaccaactacaacggcaagttcaagggcagagccacactgaccgccgatacctctagcagcacagcctacatgcagctgagcagcctgaccagcgaagatagcgccgtgtacttctgtgcccggtccatcacaacagtcgtgggctgcgctatggactattggggccagggaacaagcgtgaccgtgtctagtacgcgtatccagaaccctgatcctgccgtgtaccagctgcgggatagcaagagcagcgacaagagcgtgtgtctgttcaccgacttcgacagccagaccaacgtgtcccagagcaaggactccgacgtgtacatcaccgataagtgcgtgctggacatgcggagcatggacttcaagagcaactccgccgtggcctggtccaacaagtccgatttcgcctgcgccaacgccttcaacaacagcattatccccgaggacacattcttcccaagccccgagagcagctgcgacgtgaagctggtggaaaagagcttcgagacagacaccaacctgaacttccagaacctgagcgtgatcggcttcagaatcctgctgctgaaagtggccggctttaacctgctgatgaccctgcggctgtggtccagccgcgccaagagaagcggatctggcgtgaagcagaccctgaatttcgacctgctgaagctggctggcgacgtggaatccaacccaggcccttctagaggccatatgaccgagtacaagcccacggtgcgcctcgccacccgcgacgacgtccccagggccgtacgcaccctcgccgccgcgttcgccgactaccccgccacgcgccacaccgtcgatccggaccgccacatcgagcgggtcaccgagctgcaagaactcttcctcacgcgcgtcgggctcgacatcggcaaggtgtgggtcgcggacgacggcgccgcggtggcggtctggaccacgccggagagcgtcgaagcgggggcggtgttcgccgagatcggcccgcgcatggccgagttgagcggttcccggctggccgcgcagcaacagatggaaggcctcctggcgccgcaccggcccaaggagcccgcgtggttcctggccaccgtcggcgtctcgcccgaccaccagggcaagggtctgggcagcgccgtcgtgctccccggagtggaggcggccgagcgcgccggggtgcccgccttcctggagacctccgcgccccgcaacctccccttctacgagcggctcggcttcaccgtcaccgccgacgtcgaggtgcccgaaggaccgcgcacctggtgcatgacccgcaagcccggtgcctga

SEQ ID NO: 22110 - DNA, 2979 bp, Artificial Sequence
  Synthetic Polynucleotide
atggccttaccagtgaccgccttgctcctgccgctggccttgctgctccacgccgccaggccgcagctccagctgcaagagtctggacctggcctggtcaagcctagcgagacactgagcctgacctgtaccgtgtccggcgatagcatcagcagcggcgattactactggggctggatcagacagcctcctggcaaaggactggaatggatcggccacatctactacagcggcgtgacctactacaaccccagcctgaagtccagagtgaccatcagcgtggacaccagccggaaccagttctccctgaagctgtctagcgtgacagccgccgataccgccgtgtactactgcaccagagaggacagcagcaactggcggagtagaggccagggaacactggtcacagttagctctggtaccggcggaggcggatctggcggcggaggtagcggtggcggaggatctgaattcgacatccagatgacacagagccctagcagcctgtctgccagcgtgggagacagagtgaccatcacatgcaaggccagcgaccacatcaacaactggctggcctggtatcagcagaagcctggacaggcccctaagctgctgatctacggcgctaccacactggaaacaggcgtgcccagcagattttctggcagcggctctggcaccgactacaccctgacaatatccagcctccagcctgaggacttcgccacctactactgtcagcagagctggaacaccccttggacattcggccagggcaccaagctggaaatcaagagactcgaggacctgaagaacgtgttcccacctgaggtggccgtgttcgagcctagcgaggccgagatcagccacacccagaaagccaccctcgtgtgcctggctaccggcttctaccccgaccatgtggaactgtcttggtgggtcaacggcaaagaggtgcacagcggcgtgtgtaccgacccccagccactgaaagaacagcccgccctgaacgacagccggtactgcctgagcagcagactgagagtgtccgccaccttctggcagaacccccggaaccacttcagatgccaggtgcagttctacggcctgagcgagaacgacgagtggacccaggacagagccaagcccgtgacccagatcgtgtctgccgaagcctggggcagagccgattgcggctttaccagcgagagctaccagcagggcgtgctgagcgccaccatcctgtacgagatcctgctgggcaaggccaccctgtacgccgtgctggtgtctgccctggtgctgatggctatggtcaagcggaaggacagccggggaagggccaagcgatctggatctggagcaacaaacttctcactactcaaacaagcaggtgacgtggaggagaatcccgggcctactagtatggactggatttggcgcatccttttccttgtcggcgctgctaccggcgcgcattccttcgaacaagttcagcttcaacagcctggcgctgagctggtcaaacctggcgcttctgtgaagatgagctgcaaagccagcggctacgccttcagcagctactggatcaactggatgaagcagaaacccggccagggactcgaatggatcggccaaatctatcccggcgacggcgacaccaactacaacggcaagttcaagggcagagccacactgaccgccgatacctctagcagcacagcctacatgcagctgagcagcctgaccagcgaagatagcgccgtgtacttctgtgcccggtccatcacaacagtcgtgggctgcgctatggactattggggccagggaacaagcgtgaccgtgtctagtacgcgtatccagaaccctgatcctgccgtgtaccagctgcgggatagcaagagcagcgacaagagcgtgtgtctgttcaccgacttcgacagccagaccaacgtgtcccagagcaaggactccgacgtgtacatcaccgataagtgcgtgctggacatgcggagcatggacttcaagagcaactccgccgtggcctggtccaacaagtccgatttcgcctgcgccaacgccttcaacaacagcattatccccgaggacacattcttcccaagccccgagagcagctgcgacgtgaagctggtggaaaagagcttcgagacagacaccaacctgaacttccagaacctgagcgtgatcggcttcagaatcctgctgctgaaagtggccggctttaacctgctgatgaccctgcggctgtggtccagccgcgccaagagaagcggatctggcgtgaagcagaccctgaatttcgacctgctgaagctggctggcgacgtggaatccaacccaggcccttctagaggccatatgaccgagtacaagcccacggtgcgcctcgccacccgcgacgacgtccccagggccgtacgcaccctcgccgccgcgttcgccgactaccccgccacgcgccacaccgtcgatccggaccgccacatcgagcgggtcaccgagctgcaagaactcttcctcacgcgcgtcgggctcgacatcggcaaggtgtgggtcgcggacgacggcgccgcggtggcggtctggaccacgccggagagcgtcgaagcgggggcggtgttcgccgagatcggcccgcgcatggccgagttgagcggttcccggctggccgcgcagcaacagatggaaggcctcctggcgccgcaccggcccaaggagcccgcgtggttcctggccaccgtcggcgtctcgcccgaccaccagggcaagggtctgggcagcgccgtcgtgctccccggagtggaggcggccgagcgcgccggggtgcccgccttcctggagacctccgcgccccgcaacctccccttctacgagcggctcggcttcaccgtcaccgccgacgtcgaggtgcccgaaggaccgcgcacctggtgcatgacccgcaagcccggtgcctga

SEQ ID NO: 22111 - DNA, 2988 bp, Artificial Sequence
  Synthetic Polynucleotide
atggccttaccagtgaccgccttgctcctgccgctggccttgctgctccacgccgccaggccggaggttcagctgcttgagtctggcggaggactggttcaacctggcggaagcctgagactgtcttgtgccgccagcggcttcacctttagcagctacgccatgagctgggtccgacaggctcctggcaaaggactggaatgggtgtccagcatcagcggcagcggcgactacatctactacgccgatagcgtgaagggcagattcaccatcagccgggacatcagcaagaacaccctgtacctccagatgaacagcctgagagccgaggacaccgccgtgtactactgtgccaaagaaggcaccggcgctaacagcagcctggccgattatagaggccagggcacactggtcaccgtgtctagtggtaccggcggaggcggatctggcggcggaggtagcggtggcggaggatctgaattcgacatccagatgacacagagccctagcagcctgtctgccagcgtgggagacagagtgaccatcacatgcaaggccagcgaccacatcaacaactggctggcctggtatcagcagaagcctggacaggcccctaagctgctgatctacggcgctaccacactggaaacaggcgtgcccagcagattttctggcagcggctctggcaccgactacaccctgacaatatccagcctccagcctgaggacttcgccacctactactgtcagcagagctggaacaccccttggacattcggccagggcaccaagctggaaatcaagagactcgaggacctgaagaacgtgttcccacctgaggtggccgtgttcgagcctagcgaggccgagatcagccacacccagaaagccaccctcgtgtgcctggctaccggcttctaccccgaccatgtggaactgtcttggtgggtcaacggcaaagaggtgcacagcggcgtgtgtaccgacccccagccactgaaagaacagcccgccctgaacgacagccggtactgcctgagcagcagactgagagtgtccgccaccttctggcagaacccccggaaccacttcagatgccaggtgcagttctacggcctgagcgagaacgacgagtggacccaggacagagccaagcccgtgacccagatcgtgtctgccgaagcctggggcagagccgattgcggctttaccagcgagagctaccagcagggcgtgctgagcgccaccatcctgtacgagatcctgctgggcaaggccaccctgtacgccgtgctggtgtctgccctggtgctgatggctatggtcaagcggaaggacagccggggaagggccaagcgatctggatctggagcaacaaacttctcactactcaaacaagcaggtgacgtggaggagaatcccgggcctactagtatggactggatttggcgcatccttttccttgtcggcgctgctaccggcgcgcattccttcgaacaagttcagcttcaacagcctggcgctgagctggtcaaacctggcgcttctgtgaagatgagctgcaaagccagcggctacgccttcagcagctactggatcaactggatgaagcagaaacccggccagggactcgaatggatcggccaaatctatcccggcgacggcgacaccaactacaacggcaagttcaagggcagagccacactgaccgccgatacctctagcagcacagcctacatgcagctgagcagcctgaccagcgaagatagcgccgtgtacttctgtgcccggtccatcacaacagtcgtgggctgcgctatggactattggggccagggaacaagcgtgaccgtgtctagtacgcgtatccagaaccctgatcctgccgtgtaccagctgcgggatagcaagagcagcgacaagagcgtgtgtctgttcaccgacttcgacagccagaccaacgtgtcccagagcaaggactccgacgtgtacatcaccgataagtgcgtgctggacatgcggagcatggacttcaagagcaactccgccgtggcctggtccaacaagtccgatttcgcctgcgccaacgccttcaacaacagcattatccccgaggacacattcttcccaagccccgagagcagctgcgacgtgaagctggtggaaaagagcttcgagacagacaccaacctgaacttccagaacctgagcgtgatcggcttcagaatcctgctgctgaaagtggccggctttaacctgctgatgaccctgcggctgtggtccagccgcgccaagagaagcggatctggcgtgaagcagaccctgaatttcgacctgctgaagctggctggcgacgtggaatccaacccaggcccttctagaggccatatgaccgagtacaagcccacggtgcgcctcgccacccgcgacgacgtccccagggccgtacgcaccctcgccgccgcgttcgccgactaccccgccacgcgccacaccgtcgatccggaccgccacatcgagcgggtcaccgagctgcaagaactcttcctcacgcgcgtcgggctcgacatcggcaaggtgtgggtcgcggacgacggcgccgcggtggcggtctggaccacgccggagagcgtcgaagcgggggcggtgttcgccgagatcggcccgcgcatggccgagttgagcggttcccggctggccgcgcagcaacagatggaaggcctcctggcgccgcaccggcccaaggagcccgcgtggttcctggccaccgtcggcgtctcgcccgaccaccagggcaagggtctgggcagcgccgtcgtgctccccggagtggaggcggccgagcgcgccggggtgcccgccttcctggagacctccgcgccccgcaacctccccttctacgagcggctcggcttcaccgtcaccgccgacgtcgaggtgcccgaaggaccgcgcacctggtgcatgacccgcaagcccggtgcctga

SEQ ID NO: 22112 - DNA, 2985 bp, Artificial Sequence
  Synthetic Polynucleotide
atggccttaccagtgaccgccttgctcctgccgctggccttgctgctccacgccgccaggccggacatccagatgacacagagccctagcagcctgtctgccagcgtgggagacagagtgaccatcacatgcaaggccagcgaccacatcaacaactggctggcctggtatcagcagaagcctggacaggcccctaagctgctgatctacggcgctaccacactggaaacaggcgtgcccagcagattttctggcagcggctctggcaccgactacaccctgacaatatccagcctccagcctgaggacttcgccacctactactgtcagcagagctggaacaccccttggacattcggccagggcaccaagctggaaatcaagagactcgaggacctgaagaacgtgttcccacctgaggtggccgtgttcgagcctagcgaggccgagatcagccacacccagaaagccaccctcgtgtgcctggctaccggcttctaccccgaccatgtggaactgtcttggtgggtcaacggcaaagaggtgcacagcggcgtgtgtaccgacccccagccactgaaagaacagcccgccctgaacgacagccggtactgcctgagcagcagactgagagtgtccgccaccttctggcagaacccccggaaccacttcagatgccaggtgcagttctacggcctgagcgagaacgacgagtggacccaggacagagccaagcccgtgacccagatcgtgtctgccgaagcctggggcagagccgattgcggctttaccagcgagagctaccagcagggcgtgctgagcgccaccatcctgtacgagatcctgctgggcaaggccaccctgtacgccgtgctggtgtctgccctggtgctgatggctatggtcaagcggaaggacagccggggaagggccaagcgatctggatctggagcaacaaacttctcactactcaaacaagcaggtgacgtggaggagaatcccgggcctactagtgccaccatggactggatttggcgcatccttttccttgtcggcgctgctaccggcgcccattccgggcccgaagtgcaactggttgaatccggtggcggcctggtgcaagcaggcggatctctcagacttagctgtgccgcctccggcagaaccttcacaatgggatggtttaggcaggctccagggaaagagagagagttcgtcgccgccatctctctgtctcccacactggcctactacgccgactctgtgaaaggccggttcaccatctccagagataatgccaagaacaccgtggtgctgcaaatgaactctctgaaacccgaggatacagccctgtactattgtgccgctgaccggaagtccgtgatgagcatcagacccgattactggggacagggcacacaagtcacagtgtcctctggatccggcggcggaggatctggcggaggcggatctgggggcggaggctctttcgaacaagttcagcttcaacagcctggcgctgagctggtcaaacctggcgcttctgtgaagatgagctgcaaagccagcggctacgccttcagcagctactggatcaactggatgaagcagaaacccggccagggactcgaatggatcggccaaatctatcccggcgacggcgacaccaactacaacggcaagttcaagggcagagccacactgaccgccgatacctctagcagcacagcctacatgcagctgagcagcctgaccagcgaagatagcgccgtgtacttctgtgcccggtccatcacaacagtcgtgggctgcgctatggactattggggccagggaacaagcgtgaccgtgtctagtacgcgtatccagaaccctgatcctgccgtgtaccagctgcgggatagcaagagcagcgacaagagcgtgtgtctgttcaccgacttcgacagccagaccaacgtgtcccagagcaaggactccgacgtgtacatcaccgataagtgcgtgctggacatgcggagcatggacttcaagagcaactccgccgtggcctggtccaacaagtccgatttcgcctgcgccaacgccttcaacaacagcattatccccgaggacacattcttcccaagccccgagagcagctgcgacgtgaagctggtggaaaagagcttcgagacagacaccaacctgaacttccagaacctgagcgtgatcggcttcagaatcctgctgctgaaagtggccggctttaacctgctgatgaccctgcggctgtggtccagccgcgccaagagaagcggatctggcgtgaagcagaccctgaatttcgacctgctgaagctggctggcgacgtggaatccaacccaggcccttctagaggccatatgaccgagtacaagcccacggtgcgcctcgccacccgcgacgacgtccccagggccgtacgcaccctcgccgccgcgttcgccgactaccccgccacgcgccacaccgtcgatccggaccgccacatcgagcgggtcaccgagctgcaagaactcttcctcacgcgcgtcgggctcgacatcggcaaggtgtgggtcgcggacgacggcgccgcggtggcggtctggaccacgccggagagcgtcgaagcgggggcggtgttcgccgagatcggcccgcgcatggccgagttgagcggttcccggctggccgcgcagcaacagatggaaggcctcctggcgccgcaccggcccaaggagcccgcgtggttcctggccaccgtcggcgtctcgcccgaccaccagggcaagggtctgggcagcgccgtcgtgctccccggagtggaggcggccgagcgcgccggggtgcccgccttcctggagacctccgcgccccgcaacctccccttctacgagcggctcggcttcaccgtcaccgccgacgtcgaggtgcccgaaggaccgcgcacctggtgcatgacccgcaagcccggtgcctga

SEQ ID NO: 22113 - DNA, 2979 bp, Artificial Sequence; identical to SEQ ID NO: 4089
  Synthetic Polynucleotide

SEQ ID NO: 22114 - DNA, 2988 bp, Artificial Sequence; identical to SEQ ID NO: 22107
  Synthetic Polynucleotide

SEQ ID NO: 22115 - DNA, 2985 bp, Artificial Sequence
  Synthetic Polynucleotide
atggccttaccagtgaccgccttgctcctgccgctggccttgctgctccacgccgccaggccgcaggtgcagctggttgaatctggcggaggactggttcagcctggcggatctctgagactgtcttgtgccgccagcggcttcaccttcaccaatcacgccatgagctgggtccgacaggcccctggaaaaggactggaactggtgtctagcatcagcggcaacggcagaaccacctactacgccgatagcgtgaagggcagattcaccatcagccgggacatcagcaagaacaccctggacctccagatgaacagcctgagagccgaggataccgccgtgtactactgtgccaaggatggcggagagacactggtggatagcagaggccagggcacactggtcacagtgtcatctctcgaggacctgaagaacgtgttcccacctgaggtggccgtgttcgagcctagcaaggccgagatcgcccacacccagaaagccaccctcgtgtgcctggctaccggcttctaccccgaccatgtggaactgtcttggtgggtcaacggcaaagaggtgcacagcggcgtgtgtaccgacccccagccactgaaagaacagcccgccctgaacgacagccggtactgcctgagcagcagactgagagtgtccgccaccttctggcagaacccccggaaccacttcagatgccaggtgcagttctacggcctgagcgagaacgacgagtggacccaggacagagccaagcccgtgacccagatcgtgtctgccgaagcctggggcagagccgattgcggcatcaccagcgccagctaccaccagggcgtgctgagcgccaccatcctgtacgagatcctgctgggcaaggccaccctgtacgccgtgctggtgtctgccctggtgctgatggctatggtcaagcggaaggacagccggggaagggccaagcgatctggatctggagcaacaaacttctcactactcaaacaagcaggtgacgtggaggagaatcccgggcctactagcaccatggccttaccagtgaccgccttgctcctgccgctggccttgctgctccacgccgccaggccgcaggtgcagctggttgaatctggcggaggactggttcagcctggcggatctctgagactgtcttgtgccgccagcggcttcaccttcaccaatcacgccatgagctgggtccgacaggcccctggaaaaggactggaactggtgtctagcatcagcggcaacggcagaaccacctactacgccgatagcgtgaagggcagattcaccatcagccgggacatcagcaagaacaccctggacctccagatgaacagcctgagagccgaggataccgccgtgtactactgtgccaaggatggcggagagacactggtggatagcagaggccagggcacactggtcacagtgtcatctctcgagagcggcggaggcggatctttcgaacaagttcagcttcaacagcctggcgctgagctggtcaaacctggcgcttctgtgaagatgagctgcaaagccagcggctacgccttcagcagctactggatcaactggatgaagcagaaacccggccagggactcgaatggatcggccaaatctatcccggcgacggcgacaccaactacaacggcaagttcaagggcagagccacactgaccgccgatacctctagcagcacagcctacatgcagctgagcagcctgaccagcgaagatagcgccgtgtacttctgtgcccggtccatcacaacagtcgtgggctgcgctatggactattggggccagggaacaagcgtgaccgtgtctagtacgcgtatccagaaccctgatcctgccgtgtaccagctgcgggatagcaagagcagcgacaagagcgtgtgtctgttcaccgacttcgacagccagaccaacgtgtcccagagcaaggactccgacgtgtacatcaccgataagtgcgtgctggacatgcggagcatggacttcaagagcaactccgccgtggcctggtccaacaagtccgatttcgcctgcgccaacgccttcaacaacagcattatccccgaggacacattcttcccaagcagcgacgtgccctgcgacgtgaagctggtggaaaagagcttcgagacagacaccaacctgaacttccagaacctgagcgtgatcggcttcagaatcctgctgctgaaagtggccggctttaacctgctgatgaccctgcggctgtggtccagccgcgccaagagaagcggatctggcgtgaagcagaccctgaatttcgacctgctgaagctggctggcgacgtggaatccaacccaggcccttctagaggccatatgaccgagtacaagcccacggtgcgcctcgccacccgcgacgacgtccccagggccgtacgcaccctcgccgccgcgttcgccgactaccccgccacgcgccacaccgtcgatccggaccgccacatcgagcgggtcaccgagctgcaagaactcttcctcacgcgcgtcgggctcgacatcggcaaggtgtgggtcgcggacgacggcgccgcggtggcggtctggaccacgccggagagcgtcgaagcgggggcggtgttcgccgagatcggcccgcgcatggccgagttgagcggttcccggctggccgcgcagcaacagatggaaggcctcctggcgccgcaccggcccaaggagcccgcgtggttcctggccaccgtcggcgtctcgcccgaccaccagggcaagggtctgggcagcgccgtcgtgctccccggagtggaggcggccgagcgcgccggggtgcccgccttcctggagacctccgcgccccgcaacctccccttctacgagcggctcggcttcaccgtcaccgccgacgtcgaggtgcccgaaggaccgcgcacctggtgcatgacccgcaagcccggtgcctga

SEQ ID NO: 22116 - DNA, 2988 bp, Artificial Sequence
  Synthetic Polynucleotide
atggccttaccagtgaccgccttgctcctgccgctggccttgctgctccacgccgccaggccgcaggtgcagctggttgaatctggcggaggactggttcagcctggcggatctctgagactgtcttgtgccgccagcggcttcaccttcaccaatcacgccatgagctgggtccgacaggcccctggaaaaggactggaactggtgtctagcatcagcggcaacggcagaaccacctactacgccgatagcgtgaagggcagattcaccatcagccgggacatcagcaagaacaccctggacctccagatgaacagcctgagagccgaggataccgccgtgtactactgtgccaaggatggcggagagacactggtggatagcagaggccagggcacactggtcacagtgtcatctctcgagatccagaaccctgatcctgccgtgtaccagctgcgggatagcaagagcagcgacaagagcgtgtgtctgttcaccgacttcgacagccagaccaacgtgtcccagagcaaggactccgacgtgtacatcaccgataagtgcgtgctggacatgcggagcatggacttcaagagcaactccgccgtggcctggtccaacaagtccgatttcgcctgcgccaacgccttcaacaacagcattatccccgaggacacattcttcccaagcagcgacgtgccctgcgacgtgaagctggtggaaaagagcttcgagacagacaccaacctgaacttccagaacctgagcgtgatcggcttcagaatcctgctgctgaaagtggccggctttaacctgctgatgaccctgcggctgtggtccagccgcgccaagagaagcggatctggcgtgaagcagaccctgaatttcgacctgctgaagctggctggcgacgtggaatccaacccaggccctactagcaccatggccttaccagtgaccgccttgctcctgccgctggccttgctgctccacgccgccaggccgcaggtgcagctggttgaatctggcggaggactggttcagcctggcggatctctgagactgtcttgtgccgccagcggcttcaccttcaccaatcacgccatgagctgggtccgacaggcccctggaaaaggactggaactggtgtctagcatcagcggcaacggcagaaccacctactacgccgatagcgtgaagggcagattcaccatcagccgggacatcagcaagaacaccctggacctccagatgaacagcctgagagccgaggataccgccgtgtactactgtgccaaggatggcggagagacactggtggatagcagaggccagggcacactggtcacagtgtcatctctcgagagcggcggaggcggatctttcgaacaagttcagcttcaacagcctggcgctgagctggtcaaacctggcgcttctgtgaagatgagctgcaaagccagcggctacgccttcagcagctactggatcaactggatgaagcagaaacccggccagggactcgaatggatcggccaaatctatcccggcgacggcgacaccaactacaacggcaagttcaagggcagagccacactgaccgccgatacctctagcagcacagcctacatgcagctgagcagcctgaccagcgaagatagcgccgtgtacttctgtgcccggtccatcacaacagtcgtgggctgcgctatggactattggggccagggaacaagcgtgaccgtgtctagtacgcgtgaggacctgaagaacgtgttcccacctgaggtggccgtgttcgagcctagcaaggccgagatcgcccacacccagaaagccaccctcgtgtgcctggctaccggcttctaccccgaccatgtggaactgtcttggtgggtcaacggcaaagaggtgcacagcggcgtgtgtaccgacccccagccactgaaagaacagcccgccctgaacgacagccggtactgcctgagcagcagactgagagtgtccgccaccttctggcagaacccccggaaccacttcagatgccaggtgcagttctacggcctgagcgagaacgacgagtggacccaggacagagccaagcccgtgacccagatcgtgtctgccgaagcctggggcagagccgattgcggcatcaccagcgccagctaccaccagggcgtgctgagcgccaccatcctgtacgagatcctgctgggcaaggccaccctgtacgccgtgctggtgtctgccctggtgctgatggctatggtcaagcggaaggacagccggggaagggccaagcgatctggatctggagcaacaaacttctcactactcaaacaagcaggtgacgtggaggagaatcccgggccttctagaggccatatgaccgagtacaagcccacggtgcgcctcgccacccgcgacgacgtccccagggccgtacgcaccctcgccgccgcgttcgccgactaccccgccacgcgccacaccgtcgatccggaccgccacatcgagcgggtcaccgagctgcaagaactcttcctcacgcgcgtcgggctcgacatcggcaaggtgtgggtcgcggacgacggcgccgcggtggcggtctggaccacgccggagagcgtcgaagcgggggcggtgttcgccgagatcggcccgcgcatggccgagttgagcggttcccggctggccgcgcagcaacagatggaaggcctcctggcgccgcaccggcccaaggagcccgcgtggttcctggccaccgtcggcgtctcgcccgaccaccagggcaagggtctgggcagcgccgtcgtgctccccggagtggaggcggccgagcgcgccggggtgcccgccttcctggagacctccgcgccccgcaacctccccttctacgagcggctcggcttcaccgtcaccgccgacgtcgaggtgcccgaaggaccgcgcacctggtgcatgacccgcaagcccggtgcctga

SEQ ID NO: 22117 - DNA, 2988 bp, Artificial Sequence
  Synthetic Polynucleotide
atggccttaccagtgaccgccttgctcctgccgctggccttgctgctccacgccgccaggccgcagctccagctgcaagagtctggacctggcctggtcaagcctagcgagacactgagcctgacctgtaccgtgtccggcgatagcatcagcagcggcgattactactggggctggatcagacagcctcctggcaaaggactggaatggatcggccacatctactacagcggcgtgacctactacaaccccagcctgaagtccagagtgaccatcagcgtggacaccagccggaaccagttctccctgaagctgtctagcgtgacagccgccgataccgccgtgtactactgcaccagagaggacagcagcaactggcggagtagaggccagggaacactggtcacagttagctctctcgagatccagaaccctgatcctgccgtgtaccagctgcgggatagcaagagcagcgacaagagcgtgtgtctgttcaccgacttcgacagccagaccaacgtgtcccagagcaaggactccgacgtgtacatcaccgataagtgcgtgctggacatgcggagcatggacttcaagagcaactccgccgtggcctggtccaacaagtccgatttcgcctgcgccaacgccttcaacaacagcattatccccgaggacacattcttcccaagcagcgacgtgccctgcgacgtgaagctggtggaaaagagcttcgagacagacaccaacctgaacttccagaacctgagcgtgatcggcttcagaatcctgctgctgaaagtggccggctttaacctgctgatgaccctgcggctgtggtccagccgcgccaagagaagcggatctggcgtgaagcagaccctgaatttcgacctgctgaagctggctggcgacgtggaatccaacccaggccctactagcaccatggccttaccagtgaccgccttgctcctgccgctggccttgctgctccacgccgccaggccgcagctccagctgcaagagtctggacctggcctggtcaagcctagcgagacactgagcctgacctgtaccgtgtccggcgatagcatcagcagcggcgattactactggggctggatcagacagcctcctggcaaaggactggaatggatcggccacatctactacagcggcgtgacctactacaaccccagcctgaagtccagagtgaccatcagcgtggacaccagccggaaccagttctccctgaagctgtctagcgtgacagccgccgataccgccgtgtactactgcaccagagaggacagcagcaactggcggagtagaggccagggaacactggtcacagttagctctctcgagagcggcggaggcggatctttcgaacaagttcagcttcaacagcctggcgctgagctggtcaaacctggcgcttctgtgaagatgagctgcaaagccagcggctacgccttcagcagctactggatcaactggatgaagcagaaacccggccagggactcgaatggatcggccaaatctatcccggcgacggcgacaccaactacaacggcaagttcaagggcagagccacactgaccgccgatacctctagcagcacagcctacatgcagctgagcagcctgaccagcgaagatagcgccgtgtacttctgtgcccggtccatcacaacagtcgtgggctgcgctatggactattggggccagggaacaagcgtgaccgtgtctagtacgcgtgaggacctgaagaacgtgttcccacctgaggtggccgtgttcgagcctagcaaggccgagatcgcccacacccagaaagccaccctcgtgtgcctggctaccggcttctaccccgaccatgtggaactgtcttggtgggtcaacggcaaagaggtgcacagcggcgtgtgtaccgacccccagccactgaaagaacagcccgccctgaacgacagccggtactgcctgagcagcagactgagagtgtccgccaccttctggcagaacccccggaaccacttcagatgccaggtgcagttctacggcctgagcgagaacgacgagtggacccaggacagagccaagcccgtgacccagatcgtgtctgccgaagcctggggcagagccgattgcggcatcaccagcgccagctaccaccagggcgtgctgagcgccaccatcctgtacgagatcctgctgggcaaggccaccctgtacgccgtgctggtgtctgccctggtgctgatggctatggtcaagcggaaggacagccggggaagggccaagcgatctggatctggagcaacaaacttctcactactcaaacaagcaggtgacgtggaggagaatcccgggccttctagaggccatatgaccgagtacaagcccacggtgcgcctcgccacccgcgacgacgtccccagggccgtacgcaccctcgccgccgcgttcgccgactaccccgccacgcgccacaccgtcgatccggaccgccacatcgagcgggtcaccgagctgcaagaactcttcctcacgcgcgtcgggctcgacatcggcaaggtgtgggtcgcggacgacggcgccgcggtggcggtctggaccacgccggagagcgtcgaagcgggggcggtgttcgccgagatcggcccgcgcatggccgagttgagcggttcccggctggccgcgcagcaacagatggaaggcctcctggcgccgcaccggcccaaggagcccgcgtggttcctggccaccgtcggcgtctcgcccgaccaccagggcaagggtctgggcagcgccgtcgtgctccccggagtggaggcggccgagcgcgccggggtgcccgccttcctggagacctccgcgccccgcaacctccccttctacgagcggctcggcttcaccgtcaccgccgacgtcgaggtgcccgaaggaccgcgcacctggtgcatgacccgcaagcccggtgcctga

SEQ ID NO: 22118 - DNA, 2943 bp, Artificial Sequence
  Synthetic Polynucleotide
atggccttaccagtgaccgccttgctcctgccgctggccttgctgctccacgccgccaggccggaggtgcagctggttgaatctggcggaggactggttcagcctggcggatctctgagactgtcctgcacattttccggcggcaccttcagcagctacacaatgggctggttcagacaggcccctggcaaagaacgggaatttgtggccgaagtccgatggggcggagtgaccacatacagcaacagcctgaaggacagattcagcatcagcgaggacagcgtgaagaacgccgtgtacctccagatgaactccctgaagcctgaggacacagccgtgtactattgtgccgctgtgcggcagatgtacatgaccgtggtgcctgattattggggccagggcacactggtcacagtgtctagcagcggcggaggcggatctgacatccagatgacacagagccctagcagcctgtctgccagcgtgggagacagagtgaccatcacatgcaaggccagcgaccacatcaacaactggctggcctggtatcagcagaagcctggcaaggcccctaagctgctgatctacggcgctaccacactggaaacaggcgtgcccagcagattttctggcagcggctctggcaccgacttcaccctgacaatatccagcctccagcctgaggacttcgccacctactactgtcagcagagctggaacaccccttggacattcggccagggcaccaaggtggaaatcaagagactcgaggacctgaagaacgtgttcccacctgaggtggccgtgttcgagcctagcgaggccgagatcagccacacccagaaagccaccctcgtgtgcctggctaccggcttctaccccgaccatgtggaactgtcttggtgggtcaacggcaaagaggtgcacagcggcgtgtgtaccgacccccagccactgaaagaacagcccgccctgaacgacagccggtactgcctgagcagcagactgagagtgtccgccaccttctggcagaacccccggaaccacttcagatgccaggtgcagttctacggcctgagcgagaacgacgagtggacccaggacagagccaagcccgtgacccagatcgtgtctgccgaagcctggggcagagccgattgcggctttaccagcgagagctaccagcagggcgtgctgagcgccaccatcctgtacgagatcctgctgggcaaggccaccctgtacgccgtgctggtgtctgccctggtgctgatggctatggtcaagcggaaggacagccggggaagggccaagcgatctggatctggagcaacaaacttctcactactcaaacaagcaggtgacgtggaggagaatcccgggcctactagtatggactggatttggcgcatccttttccttgtcggcgctgctaccggcgcgcattccttcgaagttcagctggttgaatctggcggcggactggttcaacctggcggatctctgagactgagctgtgccgcctctggctacgcctttagcagctactgggtcaactgggttcgacaggcccctggcaaaggactggaatgggtcgcccaaatctatcccggcgacggcgacaccaactacaacggcaagttcaagggcagattcaccatcagccgggacaacagcaagaacaccctgtacctccagatgaactccctgagagccgaggacaccgccgtgtactattgtgccagatccatcaccaccgtcgtgggctgcgctatggattattggggccagggaaccctggtcaccgtgtcctctacgcgtatccagaaccctgatcctgccgtgtaccagctgcgggatagcaagagcagcgacaagagcgtgtgtctgttcaccgacttcgacagccagaccaacgtgtcccagagcaaggactccgacgtgtacatcaccgataagtgcgtgctggacatgcggagcatggacttcaagagcaactccgccgtggcctggtccaacaagtccgatttcgcctgcgccaacgccttcaacaacagcattatccccgaggacacattcttcccaagccccgagagcagctgcgacgtgaagctggtggaaaagagcttcgagacagacaccaacctgaacttccagaacctgagcgtgatcggcttcagaatcctgctgctgaaagtggccggctttaacctgctgatgaccctgcggctgtggtccagccgcgccaagagaagcggatctggcgtgaagcagaccctgaatttcgacctgctgaagctggctggcgacgtggaatccaacccaggcccttctagaggccatatgaccgagtacaagcccacggtgcgcctcgccacccgcgacgacgtccccagggccgtacgcaccctcgccgccgcgttcgccgactaccccgccacgcgccacaccgtcgatccggaccgccacatcgagcgggtcaccgagctgcaagaactcttcctcacgcgcgtcgggctcgacatcggcaaggtgtgggtcgcggacgacggcgccgcggtggcggtctggaccacgccggagagcgtcgaagcgggggcggtgttcgccgagatcggcccgcgcatggccgagttgagcggttcccggctggccgcgcagcaacagatggaaggcctcctggcgccgcaccggcccaaggagcccgcgtggttcctggccaccgtcggcgtctcgcccgaccaccagggcaagggtctgggcagcgccgtcgtgctccccggagtggaggcggccgagcgcgccggggtgcccgccttcctggagacctccgcgccccgcaacctccccttctacgagcggctcggcttcaccgtcaccgccgacgtcgaggtgcccgaaggaccgcgcacctggtgcatgacccgcaagcccggtgcctga

SEQ ID NO: 22119 - DNA, 2988 bp, Artificial Sequence
  Synthetic Polynucleotide
atggccttaccagtgaccgccttgctcctgccgctggccttgctgctccacgccgccaggccggacatccagatgacacagagccctagcagcctgtctgccagcgtgggagacagagtgaccatcacatgcaaggccagcgaccacatcaacaactggctggcctggtatcagcagaagcctggacaggcccctaagctgctgatctacggcgctaccacactggaaacaggcgtgcccagcagattttctggcagcggctctggcaccgactacaccctgacaatatccagcctccagcctgaggacttcgccacctactactgtcagcagagctggaacaccccttggacattcggccagggcaccaagctggaaatcaagagactcgaggccgacgtgtcccccaagcctaccatcttcctgccctctatcgccgagacaaagctccagaaggccggcacctacctgtgcctgctggaaaagttcttcccagatgtgattaagatccactggcaggaaaagaagtccaacaccatcctgggcagccaggaaggcaacaccatgaagaccaacgacacctacatgaagttcagctggctgaccgtgcccgagaagtccctggacaaagaacacagatgcatcgtgcggcacgaaaacaacaagaacggcgtggaccaggaaatcatcttcccacccatcaagaccgatgtgattacaatggaccccaaggacaactgctccaaggacgccaacgataccctgctgctccagctgaccaacaccagcgcctactacatgtacttgttgctgctgctgaagtccgtggtgtacttcgccatcatcacatgctgcctgctgcggagaaccgccttctgctgcaacggcgagaagtctagggccaagcgatctggatctggagcaacaaacttctcactactcaaacaagcaggtgacgtggaggagaatcccgggcctactagtgccaccatggactggatttggcgcatccttttccttgtcggcgctgctaccggcgcccattccgggccccaggttcagctgcaagagtctggcggaggacttgctcaagctggcggaagcctgagactgtcttgtgccgcctctggcagaaccttcagcatgggctggtttagacaggcccctggcaaagagagagagttcgtcgccgccatcacatacagcggcggcagcccttactacgcctcttctgtcagaggccggttcaccatcagccgggacaacgccaagaacaccgtgtacctccagatgaacagcctgaagccagaggacaccgccgtgtactactgtgccgccaatccaacctacggcagcgactggaatgccgagaattggggccagggcacccaagtgacagtgtctagtggatccggcggcggaggatctggcggaggcggatctgggggcggaggctctttcgaacaagttcagcttcaacagcctggcgctgagctggtcaaacctggcgcttctgtgaagatgagctgcaaagccagcggctacgccttcagcagctactggatcaactggatgaagcagaaacccggccagggactcgaatggatcggccaaatctatcccggcgacggcgacaccaactacaacggcaagttcaagggcagagccacactgaccgccgatacctctagcagcacagcctacatgcagctgagcagcctgaccagcgaagatagcgccgtgtacttctgtgcccggtccatcacaacagtcgtgggctgcgctatggactattggggccagggaacaagcgtgaccgtgtctagtacgcgtcctcacaccaagcccagcgtgttcgtgatgaagaacggcaccaacgtggcctgcctcgtgaaagagttctaccccaaggacatcaggatcaacctggtgtccagcaagaagatcaccgagttcgaccccgccatcgtgatctcccccagcggcaagtacaacgccgtgaagctggggaagtacgaggacagcaacagcgtgacctgctccgtgcagcacgacaacaagaccgtgcacagcaccgactttgaagtgaaaaccgactccaccgaccacgtgaagcccaaagagacagagaacaccaagcagcccagcaagagctgccacaagcccaaggccatcgtgcacaccgagaaagtgaacatgatgagcctgaccgtgctgggcctgcggatgctgttcgccaaaaccgtggccgtgaacttcctgctgaccgccaagctgttcttcctccgcgccaagagaagcggatctggcgtgaagcagaccctgaatttcgacctgctgaagctggctggcgacgtggaatccaacccaggcccttctagaggccatatgaccgagtacaagcccacggtgcgcctcgccacccgcgacgacgtccccagggccgtacgcaccctcgccgccgcgttcgccgactaccccgccacgcgccacaccgtcgatccggaccgccacatcgagcgggtcaccgagctgcaagaactcttcctcacgcgcgtcgggctcgacatcggcaaggtgtgggtcgcggacgacggcgccgcggtggcggtctggaccacgccggagagcgtcgaagcgggggcggtgttcgccgagatcggcccgcgcatggccgagttgagcggttcccggctggccgcgcagcaacagatggaaggcctcctggcgccgcaccggcccaaggagcccgcgtggttcctggccaccgtcggcgtctcgcccgaccaccagggcaagggtctgggcagcgccgtcgtgctccccggagtggaggcggccgagcgcgccggggtgcccgccttcctggagacctccgcgccccgcaacctccccttctacgagcggctcggcttcaccgtcaccgccgacgtcgaggtgcccgaaggaccgcgcacctggtgcatgacccgcaagcccggtgcctga

SEQ ID NO: 22120 - DNA, 2997 bp, Artificial Sequence
  Synthetic Polynucleotide
atggccttaccagtgaccgccttgctcctgccgctggccttgctgctccacgccgccaggccggacatccagatgacacagagccctagcagcctgtctgccagcgtgggagacagagtgaccatcacatgcaaggccagcgaccacatcaacaactggctggcctggtatcagcagaagcctggacaggcccctaagctgctgatctacggcgctaccacactggaaacaggcgtgcccagcagattttctggcagcggctctggcaccgactacaccctgacaatatccagcctccagcctgaggacttcgccacctactactgtcagcagagctggaacaccccttggacattcggccagggcaccaagctggaaatcaagagactcgagggacagcctaaggccaatcctaccgtgacactgttccctccaagcagcgaagaactccaggccaacaaggccacacttgtgtgcctgatctccgacttctaccctggggctgtgacagtggcttggaaggccgatggatctcctgtgaaagccggcgtggaaaccaccaagccatccaagcagagcaacaacaaatacgccgccagctcctacctgagcctgacacctgagcagtggaagtcccacagatcctacagctgccaagtgacccacgaaggcagcaccgtggaaaagacagtggcccctacagagtgcagcggcagagccgattgcggctttaccagcgagagctaccagcagggcgtgctgagcgccaccatcctgtacgagatcctgctgggcaaggccaccctgtacgccgtgctggtgtctgccctggtgctgatggctatggtcaagcggaaggacagccggggaagggccaagcgatctggatctggagcaacaaacttctcactactcaaacaagcaggtgacgtggaggagaatcccgggcctactagtgccaccatggactggatttggcgcatccttttccttgtcggcgctgctaccggcgcccattccgggccccaggttcagctgcaagagtctggcggaggacttgctcaagctggcggaagcctgagactgtcttgtgccgcctctggcagaaccttcagcatgggctggtttagacaggcccctggcaaagagagagagttcgtcgccgccatcacatacagcggcggcagcccttactacgcctcttctgtcagaggccggttcaccatcagccgggacaacgccaagaacaccgtgtacctccagatgaacagcctgaagccagaggacaccgccgtgtactactgtgccgccaatccaacctacggcagcgactggaatgccgagaattggggccagggcacccaagtgacagtgtctagtggatccggcggcggaggatctggcggaggcggatctgggggcggaggctctttcgaacaagttcagcttcaacagcctggcgctgagctggtcaaacctggcgcttctgtgaagatgagctgcaaagccagcggctacgccttcagcagctactggatcaactggatgaagcagaaacccggccagggactcgaatggatcggccaaatctatcccggcgacggcgacaccaactacaacggcaagttcaagggcagagccacactgaccgccgatacctctagcagcacagcctacatgcagctgagcagcctgaccagcgaagatagcgccgtgtacttctgtgcccggtccatcacaacagtcgtgggctgcgctatggactattggggccagggaacaagcgtgaccgtgtctagtacgcgtgcctctacaaagggaccctccgtgtttcctctggctcccagcagcaagtctacaagcggaggaacagccgctctgggctgcctggtcaaggattactttcccgagcctgtgaccgtgtcctggaatagcggagcactgacaagcggcgtgcacacctttccagccgtgctgcaaagcagcggcctgtactctctgagcagcgtggtcacagtgcctagctctagcctgggcacccagacctacatctgcaatgtgaaccacaagcctagcaacaccaaggtggacaagagagtggaacccaagagctgtatccccgaggacacattcttcccaagccccgagagcagctgcgacgtgaagctggtggaaaagagcttcgagacagacaccaacctgaacttccagaacctgagcgtgatcggcttcagaatcctgctgctgaaagtggccggctttaacctgctgatgaccctgcggctgtggtccagccgcgccaagagaagcggatctggcgtgaagcagaccctgaatttcgacctgctgaagctggctggcgacgtggaatccaacccaggcccttctagaggccatatgaccgagtacaagcccacggtgcgcctcgccacccgcgacgacgtccccagggccgtacgcaccctcgccgccgcgttcgccgactaccccgccacgcgccacaccgtcgatccggaccgccacatcgagcgggtcaccgagctgcaagaactcttcctcacgcgcgtcgggctcgacatcggcaaggtgtgggtcgcggacgacggcgccgcggtggcggtctggaccacgccggagagcgtcgaagcgggggcggtgttcgccgagatcggcccgcgcatggccgagttgagcggttcccggctggccgcgcagcaacagatggaaggcctcctggcgccgcaccggcccaaggagcccgcgtggttcctggccaccgtcggcgtctcgcccgaccaccagggcaagggtctgggcagcgccgtcgtgctccccggagtggaggcggccgagcgcgccggggtgcccgccttcctggagacctccgcgccccgcaacctccccttctacgagcggctcggcttcaccgtcaccgccgacgtcgaggtgcccgaaggaccgcgcacctggtgcatgacccgcaagcccggtgcctga

SEQ ID NO: 22121 - DNA, 3063 bp, Artificial Sequence
  Synthetic Polynucleotide
atggccttaccagtgaccgccttgctcctgccgctggccttgctgctccacgccgccaggccggacatccagatgacacagagccctagcagcctgtctgccagcgtgggagacagagtgaccatcacatgcaaggccagcgaccacatcaacaactggctggcctggtatcagcagaagcctggacaggcccctaagctgctgatctacggcgctaccacactggaaacaggcgtgcccagcagattttctggcagcggctctggcaccgactacaccctgacaatatccagcctccagcctgaggacttcgccacctactactgtcagcagagctggaacaccccttggacattcggccagggcaccaagctggaaatcaagagactcgagggacagcctaaggccaatcctaccgtgacactgttccctccaagcagcgaagaactccaggccaacaaggccacacttgtgtgcctgatctccgacttctaccctggggctgtgacagtggcttggaaggccgatggatctcctgtgaaagccggcgtggaaaccaccaagccatccaagcagagcaacaacaaatacgccgccagctcctacctgagcctgacacctgagcagtggaagtcccacagatcctacagctgccaagtgacccacgaaggcagcaccgtggaaaagacagtggcccctacagagtgcagccccatcaagaccgatgtgattacaatggaccccaaggacaactgctccaaggacgccaacgataccctgctgctccagctgaccaacaccagcgcctactacatgtacttgttgctgctgctgaagtccgtggtgtacttcgccatcatcacatgctgcctgctgcggagaaccgccttctgctgcaacggcgagaagtctagggccaagcgatctggatctggagcaacaaacttctcactactcaaacaagcaggtgacgtggaggagaatcccgggcctactagtgccaccatggactggatttggcgcatccttttccttgtcggcgctgctaccggcgcccattccgggccccaggttcagctgcaagagtctggcggaggacttgctcaagctggcggaagcctgagactgtcttgtgccgcctctggcagaaccttcagcatgggctggtttagacaggcccctggcaaagagagagagttcgtcgccgccatcacatacagcggcggcagcccttactacgcctcttctgtcagaggccggttcaccatcagccgggacaacgccaagaacaccgtgtacctccagatgaacagcctgaagccagaggacaccgccgtgtactactgtgccgccaatccaacctacggcagcgactggaatgccgagaattggggccagggcacccaagtgacagtgtctagtggatccggcggcggaggatctggcggaggcggatctgggggcggaggctctttcgaacaagttcagcttcaacagcctggcgctgagctggtcaaacctggcgcttctgtgaagatgagctgcaaagccagcggctacgccttcagcagctactggatcaactggatgaagcagaaacccggccagggactcgaatggatcggccaaatctatcccggcgacggcgacaccaactacaacggcaagttcaagggcagagccacactgaccgccgatacctctagcagcacagcctacatgcagctgagcagcctgaccagcgaagatagcgccgtgtacttctgtgcccggtccatcacaacagtcgtgggctgcgctatggactattggggccagggaacaagcgtgaccgtgtctagtacgcgtgcctctacaaagggaccctccgtgtttcctctggctcccagcagcaagtctacaagcggaggaacagccgctctgggctgcctggtcaaggattactttcccgagcctgtgaccgtgtcctggaatagcggagcactgacaagcggcgtgcacacctttccagccgtgctgcaaagcagcggcctgtactctctgagcagcgtggtcacagtgcctagctctagcctgggcacccagacctacatctgcaatgtgaaccacaagcctagcaacaccaaggtggacaagagagtggaacccaagagctgtgaagtgaaaaccgactccaccgaccacgtgaagcccaaagagacagagaacaccaagcagcccagcaagagctgccacaagcccaaggccatcgtgcacaccgagaaagtgaacatgatgagcctgaccgtgctgggcctgcggatgctgttcgccaaaaccgtggccgtgaacttcctgctgaccgccaagctgttcttcctccgcgccaagagaagcggatctggcgtgaagcagaccctgaatttcgacctgctgaagctggctggcgacgtggaatccaacccaggcccttctagaggccatatgaccgagtacaagcccacggtgcgcctcgccacccgcgacgacgtccccagggccgtacgcaccctcgccgccgcgttcgccgactaccccgccacgcgccacaccgtcgatccggaccgccacatcgagcgggtcaccgagctgcaagaactcttcctcacgcgcgtcgggctcgacatcggcaaggtgtgggtcgcggacgacggcgccgcggtggcggtctggaccacgccggagagcgtcgaagcgggggcggtgttcgccgagatcggcccgcgcatggccgagttgagcggttcccggctggccgcgcagcaacagatggaaggcctcctggcgccgcaccggcccaaggagcccgcgtggttcctggccaccgtcggcgtctcgcccgaccaccagggcaagggtctgggcagcgccgtcgtgctccccggagtggaggcggccgagcgcgccggggtgcccgccttcctggagacctccgcgccccgcaacctccccttctacgagcggctcggcttcaccgtcaccgccgacgtcgaggtgcccgaaggaccgcgcacctggtgcatgacccgcaagcccggtgcctga

SEQ ID NO: 22122 - DNA, 2667 bp, Artificial Sequence; identical to SEQ ID NO: 6821
  Synthetic Polynucleotide

SEQ ID NO: 22123 - DNA, 3405 bp, Artificial Sequence
  Synthetic Polynucleotide
atggccttaccagtgaccgccttgctcctgccgctggccttgctgctccacgccgccaggccggcatgcgaagtgcagctgcttgaaagtggcggcggactgattcagcctggcggatctctgagactgagctgtgccgccagcggcttcaccttttctagccacgccatgacctgggtccgacaggcacctggaaaagggcttgaatgggtgtccgccatcagcggctctggcgattacacacactacgccgacagcgtgaagggcagattcaccatcagcagagacaacagcaagaacaccgtgtacctccagatgaacagcctgagagccgaggacagcgccgtgtattattgcgccaaggatgaggatggcggcagcctgcttggacacagaggacaaggcaccctggtcaccgtttcttccggtaccggcggaggcggatctggcggcggaggtagcggtggcggaggatctgaattcgacatccagatgacacagagccctagcagcctgtctgccagcgtgggagacagagtgaccatcacatgcaaggccagcgaccacatcaacaactggctggcctggtatcagcagaagcctggacaggcccctaagctgctgatctacggcgctaccacactggaaacaggcgtgcccagcagattttctggcagcggctctggcaccgactacaccctgacaatatccagcctccagcctgaggacttcgccacctactactgtcagcagagctggaacaccccttggacattcggccagggcaccaagctggaaatcaagagactcgaggacctgaagaacgtgttcccacctgaggtggccgtgttcgagcctagcaaggccgagatcgcccacacccagaaagccaccctcgtgtgcctggctaccggcttctaccccgaccatgtggaactgtcttggtgggtcaacggcaaagaggtgcacagcggcgtgtgtaccgacccccagccactgaaagaacagcccgccctgaacgacagccggtactgcctgagcagcagactgagagtgtccgccaccttctggcagaacccccggaaccacttcagatgccaggtgcagttctacggcctgagcgagaacgacgagtggacccaggacagagccaagcccgtgacccagatcgtgtctgccgaagcctggggcagagccgattgcggcatcaccagcgccagctaccaccagggcgtgctgagcgccaccatcctgtacgagatcctgctgggcaaggccaccctgtacgccgtgctggtgtctgccctggtgctgatggctatggtcaagcggaaggacagccggggaagggccaagcgatctggatctggagcaacaaacttctcactactcaaacaagcaggtgacgtggaggagaatcccgggcctactagtgccaccatggactggatttggcgcatccttttccttgtcggcgctgctaccggcgcccattccgggccccaggttcagctgcaagagtctggcggaggacttgctcaagctggcggaagcctgagactgtcttgtgccgcctctggcagaaccttcagcatgggctggtttagacaggcccctggcaaagagagagagttcgtcgccgccatcacatacagcggcggcagcccttactacgcctcttctgtcagaggccggttcaccatcagccgggacaacgccaagaacaccgtgtacctccagatgaacagcctgaagccagaggacaccgccgtgtactactgtgccgccaatccaacctacggcagcgactggaatgccgagaattggggccagggcacccaagtgacagtgtctagtggatccggcggcggaggatctggcggaggcggatctgggggcggaggctctttcgaacaagttcagcttcaacagcctggcgctgagctggtcaaacctggcgcttctgtgaagatgagctgcaaagccagcggctacgccttcagcagctactggatcaactggatgaagcagaaacccggccagggactcgaatggatcggccaaatctatcccggcgacggcgacaccaactacaacggcaagttcaagggcagagccacactgaccgccgatacctctagcagcacagcctacatgcagctgagcagcctgaccagcgaagatagcgccgtgtacttctgtgcccggtccatcacaacagtcgtgggctgcgctatggactattggggccagggaacaagcgtgaccgtgtctagtacgcgtatccagaaccctgatcctgccgtgtaccagctgcgggatagcaagagcagcgacaagagcgtgtgtctgttcaccgacttcgacagccagaccaacgtgtcccagagcaaggactccgacgtgtacatcaccgataagtgcgtgctggacatgcggagcatggacttcaagagcaactccgccgtggcctggtccaacaagtccgatttcgcctgcgccaacgccttcaacaacagcattatccccgaggacacattcttcccaagcagcgacgtgccctgcgacgtgaagctggtggaaaagagcttcgagacagacaccaacctgaacttccagaacctgagcgtgatcggcttcagaatcctgctgctgaaagtggccggctttaacctgctgatgaccctgcggctgtggtccagccgcgccaagagaagcggatctggcgtgaagcagaccctgaatttcgacctgctgaagctggctggcgacgtggaatccaacccaggcccttctagaggccatatgaccgagtacaagcccacggtgcgcctcgccacccgcgacgacgtccccagggccgtacgcaccctcgccgccgcgttcgccgactaccccgccacgcgccacaccgtcgatccggaccgccacatcgagcgggtcaccgagctgcaagaactcttcctcacgcgcgtcgggctcgacatcggcaaggtgtgggtcgcggacgacggcgccgcggtggcggtctggaccacgccggagagcgtcgaagcgggggcggtgttcgccgagatcggcccgcgcatggccgagttgagcggttcccggctggccgcgcagcaacagatggaaggcctcctggcgccgcaccggcccaaggagcccgcgtggttcctggccaccgtcggcgtctcgcccgaccaccagggcaagggtctgggcagcgccgtcgtgctccccggagtggaggcggccgagcgcgccggggtgcccgccttcctggagacctccgcgccccgcaacctccccttctacgagcggctcggcttcaccgtcaccgccgacgtcgaggtgcccgaaggaccgcgcacctggtgcatgacccgcaagcccggtgcctga

SEQ ID NO: 22124 - DNA, 3783 bp, Artificial Sequence
  Synthetic Polynucleotide
atggccttaccagtgaccgccttgctcctgccgctggccttgctgctccacgccgccaggccggaagtgcagctggttgaatctggcggaggactggttcaggctggcggatctctgagactgtcttgtgccgccagcggcagaacctttagcatgggctggtttagacaggcccctggcaaagagagagagttcgtcgccgccatcacatactctggcggcagcccttactacgccgactctgtgaagggcagattcaccatcagccgggacaacgccaagaacaccgtgtacctccagatgaacagcctgaagcctgaggacaccgccgtgtactactgcgccgccaatccaacatacggcagcgactggaacgccgagaattggggccagggaacccaagtgacagtgtctagcggcggaggcggaagtggaggcggaggatctcaactgcaactgcaagagtctggccctggcctggtcaagccttctgaaaccctgagcctgacctgtaccgtgtccggcggctctatcagcagcggcgattactactggggctggatcagacagcctccaggcaagggactcgaatggatcggcagcatcagctacagcggctccacctactacaacccaagcctgaagtccagagtgaccatcagcgtggacaccagcagaaaccagttctccctgaagctgagcagcgtgacagccgccgatacagccgtgtattattgcaccagagaggacagcagcaactggcggagtagaggacagggcacactggtcacagtgtcctctggtaccggcggaggcggatctggcggcggaggtagcggtggcggaggatctgaattcgacatccagatgacacagagccctagcagcctgtctgccagcgtgggagacagagtgaccatcacatgcaaggccagcgaccacatcaacaactggctggcctggtatcagcagaagcctggacaggcccctaagctgctgatctacggcgctaccacactggaaacaggcgtgcccagcagattttctggcagcggctctggcaccgactacaccctgacaatatccagcctccagcctgaggacttcgccacctactactgtcagcagagctggaacaccccttggacattcggccagggcaccaagctggaaatcaagagactcgagatccagaaccctgatcctgccgtgtaccagctgcgggatagcaagagcagcgacaagagcgtgtgtctgttcaccgacttcgacagccagaccaacgtgtcccagagcaaggactccgacgtgtacatcaccgataagtgcgtgctggacatgcggagcatggacttcaagagcaactccgccgtggcctggtccaacaagtccgatttcgcctgcgccaacgccttcaacaacagcattatccccgaggacacattcttcccaagcagcgacgtgccctgcgacgtgaagctggtggaaaagagcttcgagacagacaccaacctgaacttccagaacctgagcgtgatcggcttcagaatcctgctgctgaaagtggccggctttaacctgctgatgaccctgcggctgtggtccagccgcgccaagagaagcggatctggcgtgaagcagaccctgaatttcgacctgctgaagctggctggcgacgtggaatccaacccaggccctactagtgccaccatggactggatttggcgcatccttttccttgtcggcgctgctaccggcgcccattccgggccccaggttcagctgcaagagtctggcggaggacttgctcaagctggcggaagcctgagactgtcttgtgccgcctctggcagaaccttcagcatgggctggtttagacaggcccctggcaaagagagagagttcgtcgccgccatcacatacagcggcggcagcccttactacgcctcttctgtcagaggccggttcaccatcagccgggacaacgccaagaacaccgtgtacctccagatgaacagcctgaagccagaggacaccgccgtgtactactgtgccgccaatccaacctacggcagcgactggaatgccgagaattggggccagggcacccaagtgacagtgtctagtggatccggcggcggaggatctggcggaggcggatctgggggcggaggctctttcgaacaagttcagcttcaacagcctggcgctgagctggtcaaacctggcgcttctgtgaagatgagctgcaaagccagcggctacgccttcagcagctactggatcaactggatgaagcagaaacccggccagggactcgaatggatcggccaaatctatcccggcgacggcgacaccaactacaacggcaagttcaagggcagagccacactgaccgccgatacctctagcagcacagcctacatgcagctgagcagcctgaccagcgaagatagcgccgtgtacttctgtgcccggtccatcacaacagtcgtgggctgcgctatggactattggggccagggaacaagcgtgaccgtgtctagtacgcgtgaggacctgaagaacgtgttcccacctgaggtggccgtgttcgagcctagcaaggccgagatcgcccacacccagaaagccaccctcgtgtgcctggctaccggcttctaccccgaccatgtggaactgtcttggtgggtcaacggcaaagaggtgcacagcggcgtgtgtaccgacccccagccactgaaagaacagcccgccctgaacgacagccggtactgcctgagcagcagactgagagtgtccgccaccttctggcagaacccccggaaccacttcagatgccaggtgcagttctacggcctgagcgagaacgacgagtggacccaggacagagccaagcccgtgacccagatcgtgtctgccgaagcctggggcagagccgattgcggcatcaccagcgccagctaccaccagggcgtgctgagcgccaccatcctgtacgagatcctgctgggcaaggccaccctgtacgccgtgctggtgtctgccctggtgctgatggctatggtcaagcggaaggacagccggggaagggccaagcgatctggatctggagcaacaaacttctcactactcaaacaagcaggtgacgtggaggagaatcccgggccttctagaggccatatgaccgagtacaagcccacggtgcgcctcgccacccgcgacgacgtccccagggccgtacgcaccctcgccgccgcgttcgccgactaccccgccacgcgccacaccgtcgatccggaccgccacatcgagcgggtcaccgagctgcaagaactcttcctcacgcgcgtcgggctcgacatcggcaaggtgtgggtcgcggacgacggcgccgcggtggcggtctggaccacgccggagagcgtcgaagcgggggcggtgttcgccgagatcggcccgcgcatggccgagttgagcggttcccggctggccgcgcagcaacagatggaaggcctcctggcgccgcaccggcccaaggagcccgcgtggttcctggccaccgtcggcgtctcgcccgaccaccagggcaagggtctgggcagcgccgtcgtgctccccggagtggaggcggccgagcgcgccggggtgcccgccttcctggagacctccgcgccccgcaacctccccttctacgagcggctcggcttcaccgtcaccgccgacgtcgaggtgcccgaaggaccgcgcacctggtgcatgacccgcaagcccggtgcctga

SEQ ID NO: 22125 - DNA, 3396 bp, Artificial Sequence
  Synthetic Polynucleotide
atggccttaccagtgaccgccttgctcctgccgctggccttgctgctccacgccgccaggccggaagtgcagctggttgaatctggcggaggactggttcaggctggcggatctctgagactgtcttgtgccgccagcggcagaacctttagcatgggctggtttagacaggcccctggcaaagagagagagttcgtcgccgccatcacatactctggcggcagcccttactacgccgactctgtgaagggcagattcaccatcagccgggacaacgccaagaacaccgtgtacctccagatgaacagcctgaagcctgaggacaccgccgtgtactactgcgccgccaatccaacatacggcagcgactggaacgccgagaattggggccagggaacccaagtgacagtgtctagcggtaccggcggaggcggatctggcggcggaggtagcggtggcggaggatctgaattcgacatccagatgacacagagccctagcagcctgtctgccagcgtgggagacagagtgaccatcacatgcaaggccagcgaccacatcaacaactggctggcctggtatcagcagaagcctggacaggcccctaagctgctgatctacggcgctaccacactggaaacaggcgtgcccagcagattttctggcagcggctctggcaccgactacaccctgacaatatccagcctccagcctgaggacttcgccacctactactgtcagcagagctggaacaccccttggacattcggccagggcaccaagctggaaatcaagagactcgaggacctgaagaacgtgttcccacctgaggtggccgtgttcgagcctagcaaggccgagatcgcccacacccagaaagccaccctcgtgtgcctggctaccggcttctaccccgaccatgtggaactgtcttggtgggtcaacggcaaagaggtgcacagcggcgtgtgtaccgacccccagccactgaaagaacagcccgccctgaacgacagccggtactgcctgagcagcagactgagagtgtccgccaccttctggcagaacccccggaaccacttcagatgccaggtgcagttctacggcctgagcgagaacgacgagtggacccaggacagagccaagcccgtgacccagatcgtgtctgccgaagcctggggcagagccgattgcggcatcaccagcgccagctaccaccagggcgtgctgagcgccaccatcctgtacgagatcctgctgggcaaggccaccctgtacgccgtgctggtgtctgccctggtgctgatggctatggtcaagcggaaggacagccggggaagggccaagcgatctggatctggagcaacaaacttctcactactcaaacaagcaggtgacgtggaggagaatcccgggcctactagtgccaccatggactggatttggcgcatccttttccttgtcggcgctgctaccggcgcccattccgggccccaggttcagctgcaagagtctggcggaggacttgctcaagctggcggaagcctgagactgtcttgtgccgcctctggcagaaccttcagcatgggctggtttagacaggcccctggcaaagagagagagttcgtcgccgccatcacatacagcggcggcagcccttactacgcctcttctgtcagaggccggttcaccatcagccgggacaacgccaagaacaccgtgtacctccagatgaacagcctgaagccagaggacaccgccgtgtactactgtgccgccaatccaacctacggcagcgactggaatgccgagaattggggccagggcacccaagtgacagtgtctagtggatccggcggcggaggatctggcggaggcggatctgggggcggaggctctttcgaacaagttcagcttcaacagcctggcgctgagctggtcaaacctggcgcttctgtgaagatgagctgcaaagccagcggctacgccttcagcagctactggatcaactggatgaagcagaaacccggccagggactcgaatggatcggccaaatctatcccggcgacggcgacaccaactacaacggcaagttcaagggcagagccacactgaccgccgatacctctagcagcacagcctacatgcagctgagcagcctgaccagcgaagatagcgccgtgtacttctgtgcccggtccatcacaacagtcgtgggctgcgctatggactattggggccagggaacaagcgtgaccgtgtctagtacgcgtatccagaaccctgatcctgccgtgtaccagctgcgggatagcaagagcagcgacaagagcgtgtgtctgttcaccgacttcgacagccagaccaacgtgtcccagagcaaggactccgacgtgtacatcaccgataagtgcgtgctggacatgcggagcatggacttcaagagcaactccgccgtggcctggtccaacaagtccgatttcgcctgcgccaacgccttcaacaacagcattatccccgaggacacattcttcccaagcagcgacgtgccctgcgacgtgaagctggtggaaaagagcttcgagacagacaccaacctgaacttccagaacctgagcgtgatcggcttcagaatcctgctgctgaaagtggccggctttaacctgctgatgaccctgcggctgtggtccagccgcgccaagagaagcggatctggcgtgaagcagaccctgaatttcgacctgctgaagctggctggcgacgtggaatccaacccaggcccttctagaggccatatgaccgagtacaagcccacggtgcgcctcgccacccgcgacgacgtccccagggccgtacgcaccctcgccgccgcgttcgccgactaccccgccacgcgccacaccgtcgatccggaccgccacatcgagcgggtcaccgagctgcaagaactcttcctcacgcgcgtcgggctcgacatcggcaaggtgtgggtcgcggacgacggcgccgcggtggcggtctggaccacgccggagagcgtcgaagcgggggcggtgttcgccgagatcggcccgcgcatggccgagttgagcggttcccggctggccgcgcagcaacagatggaaggcctcctggcgccgcaccggcccaaggagcccgcgtggttcctggccaccgtcggcgtctcgcccgaccaccagggcaagggtctgggcagcgccgtcgtgctccccggagtggaggcggccgagcgcgccggggtgcccgccttcctggagacctccgcgccccgcaacctccccttctacgagcggctcggcttcaccgtcaccgccgacgtcgaggtgcccgaaggaccgcgcacctggtgcatgacccgcaagcccggtgcctga

SEQ ID NO: 22126 - DNA, 3390 bp, Artificial Sequence
  Synthetic Polynucleotide
atggccttaccagtgaccgccttgctcctgccgctggccttgctgctccacgccgccaggccggaagtgcagctggttgaatctggcggaggactggttcagcctggcggatctctgagactgtcttgtgccgccagcggcttcagcttcagcgacttttggatgagctgggtccgacaggcccctggcaaaggacttgaatgggtcgccacaatcagccaggccggcagcgagaaggactacgtggactctgtgaagggcagattcaccatcagccgggacaacgccaagaagtccctgtacctccagatgaacagcctgagagccgaggacaccgccgtgtactattgtgcctctggcgtgtacagcttcgactacagaggccagggcaccctggtcacagtctcttctggtaccggcggaggcggatctggcggcggaggtagcggtggcggaggatctgaattcgacatccagatgacacagagccctagcagcctgtctgccagcgtgggagacagagtgaccatcacatgcaaggccagcgaccacatcaacaactggctggcctggtatcagcagaagcctggacaggcccctaagctgctgatctacggcgctaccacactggaaacaggcgtgcccagcagattttctggcagcggctctggcaccgactacaccctgacaatatccagcctccagcctgaggacttcgccacctactactgtcagcagagctggaacaccccttggacattcggccagggcaccaagctggaaatcaagagactcgaggacctgaagaacgtgttcccacctgaggtggccgtgttcgagcctagcaaggccgagatcgcccacacccagaaagccaccctcgtgtgcctggctaccggcttctaccccgaccatgtggaactgtcttggtgggtcaacggcaaagaggtgcacagcggcgtgtgtaccgacccccagccactgaaagaacagcccgccctgaacgacagccggtactgcctgagcagcagactgagagtgtccgccaccttctggcagaacccccggaaccacttcagatgccaggtgcagttctacggcctgagcgagaacgacgagtggacccaggacagagccaagcccgtgacccagatcgtgtctgccgaagcctggggcagagccgattgcggcatcaccagcgccagctaccaccagggcgtgctgagcgccaccatcctgtacgagatcctgctgggcaaggccaccctgtacgccgtgctggtgtctgccctggtgctgatggctatggtcaagcggaaggacagccggggaagggccaagcgatctggatctggagcaacaaacttctcactactcaaacaagcaggtgacgtggaggagaatcccgggcctactagtgccaccatggactggatttggcgcatccttttccttgtcggcgctgctaccggcgcccattccgggccccaggttcagctgcaagagtctggcggaggacttgctcaagctggcggaagcctgagactgtcttgtgccgcctctggcagaaccttcagcatgggctggtttagacaggcccctggcaaagagagagagttcgtcgccgccatcacatacagcggcggcagcccttactacgcctcttctgtcagaggccggttcaccatcagccgggacaacgccaagaacaccgtgtacctccagatgaacagcctgaagccagaggacaccgccgtgtactactgtgccgccaatccaacctacggcagcgactggaatgccgagaattggggccagggcacccaagtgacagtgtctagtggatccggcggcggaggatctggcggaggcggatctgggggcggaggctctttcgaacaagttcagcttcaacagcctggcgctgagctggtcaaacctggcgcttctgtgaagatgagctgcaaagccagcggctacgccttcagcagctactggatcaactggatgaagcagaaacccggccagggactcgaatggatcggccaaatctatcccggcgacggcgacaccaactacaacggcaagttcaagggcagagccacactgaccgccgatacctctagcagcacagcctacatgcagctgagcagcctgaccagcgaagatagcgccgtgtacttctgtgcccggtccatcacaacagtcgtgggctgcgctatggactattggggccagggaacaagcgtgaccgtgtctagtacgcgtatccagaaccctgatcctgccgtgtaccagctgcgggatagcaagagcagcgacaagagcgtgtgtctgttcaccgacttcgacagccagaccaacgtgtcccagagcaaggactccgacgtgtacatcaccgataagtgcgtgctggacatgcggagcatggacttcaagagcaactccgccgtggcctggtccaacaagtccgatttcgcctgcgccaacgccttcaacaacagcattatccccgaggacacattcttcccaagcagcgacgtgccctgcgacgtgaagctggtggaaaagagcttcgagacagacaccaacctgaacttccagaacctgagcgtgatcggcttcagaatcctgctgctgaaagtggccggctttaacctgctgatgaccctgcggctgtggtccagccgcgccaagagaagcggatctggcgtgaagcagaccctgaatttcgacctgctgaagctggctggcgacgtggaatccaacccaggcccttctagaggccatatgaccgagtacaagcccacggtgcgcctcgccacccgcgacgacgtccccagggccgtacgcaccctcgccgccgcgttcgccgactaccccgccacgcgccacaccgtcgatccggaccgccacatcgagcgggtcaccgagctgcaagaactcttcctcacgcgcgtcgggctcgacatcggcaaggtgtgggtcgcggacgacggcgccgcggtggcggtctggaccacgccggagagcgtcgaagcgggggcggtgttcgccgagatcggcccgcgcatggccgagttgagcggttcccggctggccgcgcagcaacagatggaaggcctcctggcgccgcaccggcccaaggagcccgcgtggttcctggccaccgtcggcgtctcgcccgaccaccagggcaagggtctgggcagcgccgtcgtgctccccggagtggaggcggccgagcgcgccggggtgcccgccttcctggagacctccgcgccccgcaacctccccttctacgagcggctcggcttcaccgtcaccgccgacgtcgaggtgcccgaaggaccgcgcacctggtgcatgacccgcaagcccggtgcctga

SEQ ID NO: 22127 - DNA, 3315 bp, Artificial Sequence
  Synthetic Polynucleotide
atggccttaccagtgaccgccttgctcctgccgctggccttgctgctccacgccgccaggccgatgctgcccgctcctaagaatctggtggtgtccagaatcaccgaggacagcgccagactgtcttggacagctcctgatgccgccttcgacagcttccccatccggtacatcgagacactgatctggggcgaagccatctggctggatgtgcctggaagcgagagaagctacgacctgaccggactgaagcctggcacagagtatgccgtggtcatcaccggcgtgaaaggcggcagattctctagccctctggtggcctctttcaccaccggtaccggcggaggcggatctggcggcggaggtagcggtggcggaggatctgaattcgacatccagatgacacagagccctagcagcctgtctgccagcgtgggagacagagtgaccatcacatgcaaggccagcgaccacatcaacaactggctggcctggtatcagcagaagcctggacaggcccctaagctgctgatctacggcgctaccacactggaaacaggcgtgcccagcagattttctggcagcggctctggcaccgactacaccctgacaatatccagcctccagcctgaggacttcgccacctactactgtcagcagagctggaacaccccttggacattcggccagggcaccaagctggaaatcaagagactcgagatccagaaccctgatcctgccgtgtaccagctgcgggatagcaagagcagcgacaagagcgtgtgtctgttcaccgacttcgacagccagaccaacgtgtcccagagcaaggactccgacgtgtacatcaccgataagtgcgtgctggacatgcggagcatggacttcaagagcaactccgccgtggcctggtccaacaagtccgatttcgcctgcgccaacgccttcaacaacagcattatccccgaggacacattcttcccaagcagcgacgtgccctgcgacgtgaagctggtggaaaagagcttcgagacagacaccaacctgaacttccagaacctgagcgtgatcggcttcagaatcctgctgctgaaagtggccggctttaacctgctgatgaccctgcggctgtggtccagccgcgccaagagaagcggatctggcgtgaagcagaccctgaatttcgacctgctgaagctggctggcgacgtggaatccaacccaggccctactagtgccaccatggactggatttggcgcatccttttccttgtcggcgctgctaccggcgcccattccgggccccaggttcagctgcaagagtctggcggaggacttgctcaagctggcggaagcctgagactgtcttgtgccgcctctggcagaaccttcagcatgggctggtttagacaggcccctggcaaagagagagagttcgtcgccgccatcacatacagcggcggcagcccttactacgcctcttctgtcagaggccggttcaccatcagccgggacaacgccaagaacaccgtgtacctccagatgaacagcctgaagccagaggacaccgccgtgtactactgtgccgccaatccaacctacggcagcgactggaatgccgagaattggggccagggcacccaagtgacagtgtctagtggatccggcggcggaggatctggcggaggcggatctgggggcggaggctctttcgaacaagttcagcttcaacagcctggcgctgagctggtcaaacctggcgcttctgtgaagatgagctgcaaagccagcggctacgccttcagcagctactggatcaactggatgaagcagaaacccggccagggactcgaatggatcggccaaatctatcccggcgacggcgacaccaactacaacggcaagttcaagggcagagccacactgaccgccgatacctctagcagcacagcctacatgcagctgagcagcctgaccagcgaagatagcgccgtgtacttctgtgcccggtccatcacaacagtcgtgggctgcgctatggactattggggccagggaacaagcgtgaccgtgtctagtacgcgtgaggacctgaagaacgtgttcccacctgaggtggccgtgttcgagcctagcaaggccgagatcgcccacacccagaaagccaccctcgtgtgcctggctaccggcttctaccccgaccatgtggaactgtcttggtgggtcaacggcaaagaggtgcacagcggcgtgtgtaccgacccccagccactgaaagaacagcccgccctgaacgacagccggtactgcctgagcagcagactgagagtgtccgccaccttctggcagaacccccggaaccacttcagatgccaggtgcagttctacggcctgagcgagaacgacgagtggacccaggacagagccaagcccgtgacccagatcgtgtctgccgaagcctggggcagagccgattgcggcatcaccagcgccagctaccaccagggcgtgctgagcgccaccatcctgtacgagatcctgctgggcaaggccaccctgtacgccgtgctggtgtctgccctggtgctgatggctatggtcaagcggaaggacagccggggaagggccaagcgatctggatctggagcaacaaacttctcactactcaaacaagcaggtgacgtggaggagaatcccgggccttctagaggccatatgaccgagtacaagcccacggtgcgcctcgccacccgcgacgacgtccccagggccgtacgcaccctcgccgccgcgttcgccgactaccccgccacgcgccacaccgtcgatccggaccgccacatcgagcgggtcaccgagctgcaagaactcttcctcacgcgcgtcgggctcgacatcggcaaggtgtgggtcgcggacgacggcgccgcggtggcggtctggaccacgccggagagcgtcgaagcgggggcggtgttcgccgagatcggcccgcgcatggccgagttgagcggttcccggctggccgcgcagcaacagatggaaggcctcctggcgccgcaccggcccaaggagcccgcgtggttcctggccaccgtcggcgtctcgcccgaccaccagggcaagggtctgggcagcgccgtcgtgctccccggagtggaggcggccgagcgcgccggggtgcccgccttcctggagacctccgcgccccgcaacctccccttctacgagcggctcggcttcaccgtcaccgccgacgtcgaggtgcccgaaggaccgcgcacctggtgcatgacccgcaagcccggtgcctga

SEQ ID NO: 22128 - DNA, 3417 bp, Artificial Sequence
  Synthetic Polynucleotide
atggccttaccagtgaccgccttgctcctgccgctggccttgctgctccacgccgccaggccgcaggtgcagctggttgaatctggcggaggactggttcagcctggcggatctctgagactgtcttgtgccgccagcggcttcaccttcaccaatcacgccatgagctgggtccgacaggcccctggaaaaggactggaactggtgtctagcatcagcggcaacggcagaaccacctactacgccgatagcgtgaagggcagattcaccatcagccgggacatcagcaagaacaccctggacctccagatgaacagcctgagagccgaggataccgccgtgtactactgtgccaaggatggcggagagacactggtggatagcagaggccagggcacactggtcacagtgtcatctctcgaaggcggaggcggaagtggaggcggaggatctatcgaaggcggaggcggaagtggaggcggaggatctaaagttcagctgcttgagtctggcggaggactggttcaacctggcggaagcctgagactgtcttgtgccgccagcggcttcatcttcagcagctacgccatgagctgggtccgacaggctcctggaaagggccaagaatgggtttccggcgttagcggcacaggcgtgaacacctactacgccgatagcgtgaagggcagattcaccatcagccgggacaacagcaagaacaccctgtacctccagatgaacagcctgagagccgaggacaccgccgtgtactattgtgcctctggcaaaggctgggacagcggctcttggtacgaggactatagaggccagggcaccctggtcacagtttcttcaggtaccggcggaggcggatctggcggcggaggtagcggtggcggaggatctgaattcgacatccagatgacacagagccctagcagcctgtctgccagcgtgggagacagagtgaccatcacatgcaaggccagcgaccacatcaacaactggctggcctggtatcagcagaagcctggacaggcccctaagctgctgatctacggcgctaccacactggaaacaggcgtgcccagcagattttctggcagcggctctggcaccgactacaccctgacaatatccagcctccagcctgaggacttcgccacctactactgtcagcagagctggaacaccccttggacattcggccagggcaccaagctggaaatcaagagactcgaggacctgaagaacgtgttcccacctgaggtggccgtgttcgagcctagcgaggccgagatcagccacacccagaaagccaccctcgtgtgcctggctaccggcttctaccccgaccatgtggaactgtcttggtgggtcaacggcaaagaggtgcacagcggcgtgtgtaccgacccccagccactgaaagaacagcccgccctgaacgacagccggtactgcctgagcagcagactgagagtgtccgccaccttctggcagaacccccggaaccacttcagatgccaggtgcagttctacggcctgagcgagaacgacgagtggacccaggacagagccaagcccgtgacccagatcgtgtctgccgaagcctggggcagagccgattgcggctttaccagcgagagctaccagcagggcgtgctgagcgccaccatcctgtacgagatcctgctgggcaaggccaccctgtacgccgtgctggtgtctgccctggtgctgatggctatggtcaagcggaaggacagccggggaagggccaagcgatctggatctggagcaacaaacttctcactactcaaacaagcaggtgacgtggaggagaatcccgggcctactagtatggactggatttggcgcatccttttccttgtcggcgctgctaccggcgcgcattccttcgaacaagttcagcttcaacagcctggcgctgagctggtcaaacctggcgcttctgtgaagatgagctgcaaagccagcggctacgccttcagcagctactggatcaactggatgaagcagaaacccggccagggactcgaatggatcggccaaatctatcccggcgacggcgacaccaactacaacggcaagttcaagggcagagccacactgaccgccgatacctctagcagcacagcctacatgcagctgagcagcctgaccagcgaagatagcgccgtgtacttctgtgcccggtccatcacaacagtcgtgggctgcgctatggactattggggccagggaacaagcgtgaccgtgtctagtacgcgtatccagaaccctgatcctgccgtgtaccagctgcgggatagcaagagcagcgacaagagcgtgtgtctgttcaccgacttcgacagccagaccaacgtgtcccagagcaaggactccgacgtgtacatcaccgataagtgcgtgctggacatgcggagcatggacttcaagagcaactccgccgtggcctggtccaacaagtccgatttcgcctgcgccaacgccttcaacaacagcattatccccgaggacacattcttcccaagccccgagagcagctgcgacgtgaagctggtggaaaagagcttcgagacagacaccaacctgaacttccagaacctgagcgtgatcggcttcagaatcctgctgctgaaagtggccggctttaacctgctgatgaccctgcggctgtggtccagccgcgccaagagaagcggatctggcgtgaagcagaccctgaatttcgacctgctgaagctggctggcgacgtggaatccaacccaggcccttctagagcccatatgaccgagtacaagcccacggtgcgcctcgccacccgcgacgacgtccccagggccgtacgcaccctcgccgccgcgttcgccgactaccccgccacgcgccacaccgtcgatccggaccgccacatcgagcgggtcaccgagctgcaagaactcttcctcacgcgcgtcgggctcgacatcggcaaggtgtgggtcgcggacgacggcgccgcggtggcggtctggaccacgccggagagcgtcgaagcgggggcggtgttcgccgagatcggcccgcgcatggccgagttgagcggttcccggctggccgcgcagcaacagatggaaggcctcctggcgccgcaccggcccaaggagcccgcgtggttcctggccaccgtcggcgtctcgcccgaccaccagggcaagggtctgggcagcgccgtcgtgctccccggagtggaggcggccgagcgcgccggggtgcccgccttcctggagacctccgcgccccgcaacctccccttctacgagcggctcggcttcaccgtcaccgccgacgtcgaggtgcccgaaggaccgcgcacctggtgcatgacccgcaagcccggtgcctga

SEQ ID NO: 22129 - DNA, 3396 bp, Artificial Sequence
  Synthetic Polynucleotide
atggccttaccagtgaccgccttgctcctgccgctggccttgctgctccacgccgccaggccggaagtgcaggttttggagtctggcggaggactggttcagcctggcggatctctgagactgtcttgtgccgccagcggcttcaccttcagcaactttgccatgagctgggtccgacaggcccctggcaaaggacttgaatgggtgtccacaatcagcggcagcgccggcacaacagattacgccgattctgtgaagggcagattcaccatcagccgggacaacagcaagaaaaccctgtacctccagatgaacagcctgcgcgtggaagataccgccgtgtactactgtgccgatggcagaggccccttcttcgattatcgcggccagggcacactggtcaccgtttcttctggtaccggcggaggcggatctggcggcggaggtagcggtggcggaggatctgaattcgacatccagatgacacagagccctagcagcctgtctgccagcgtgggagacagagtgaccatcacatgcaaggccagcgaccacatcaacaactggctggcctggtatcagcagaagcctggacaggcccctaagctgctgatctacggcgctaccacactggaaacaggcgtgcccagcagattttctggcagcggctctggcaccgactacaccctgacaatatccagcctccagcctgaggacttcgccacctactactgtcagcagagctggaacaccccttggacattcggccagggcaccaagctggaaatcaagagactcgagatccagaaccctgatcctgccgtgtaccagctgcgggatagcaagagcagcgacaagagcgtgtgtctgttcaccgacttcgacagccagaccaacgtgtcccagagcaaggactccgacgtgtacatcaccgataagtgcgtgctggacatgcggagcatggacttcaagagcaactccgccgtggcctggtccaacaagtccgatttcgcctgcgccaacgccttcaacaacagcattatccccgaggacacattcttcccaagcagcgacgtgccctgcgacgtgaagctggtggaaaagagcttcgagacagacaccaacctgaacttccagaacctgagcgtgatcggcttcagaatcctgctgctgaaagtggccggctttaacctgctgatgaccctgcggctgtggtccagccgcgccaagagaagcggatctggcgtgaagcagaccctgaatttcgacctgctgaagctggctggcgacgtggaatccaacccaggccctactagtgccaccatggactggatttggcgcatccttttccttgtcggcgctgctaccggcgcccattccgggccccaggttcagctgcaagagtctggcggaggacttgctcaagctggcggaagcctgagactgtcttgtgccgcctctggcagaaccttcagcatgggctggtttagacaggcccctggcaaagagagagagttcgtcgccgccatcacatacagcggcggcagcccttactacgcctcttctgtcagaggccggttcaccatcagccgggacaacgccaagaacaccgtgtacctccagatgaacagcctgaagccagaggacaccgccgtgtactactgtgccgccaatccaacctacggcagcgactggaatgccgagaattggggccagggcacccaagtgacagtgtctagtggatccggcggcggaggatctggcggaggcggatctgggggcggaggctctttcgaacaagttcagcttcaacagcctggcgctgagctggtcaaacctggcgcttctgtgaagatgagctgcaaagccagcggctacgccttcagcagctactggatcaactggatgaagcagaaacccggccagggactcgaatggatcggccaaatctatcccggcgacggcgacaccaactacaacggcaagttcaagggcagagccacactgaccgccgatacctctagcagcacagcctacatgcagctgagcagcctgaccagcgaagatagcgccgtgtacttctgtgcccggtccatcacaacagtcgtgggctgcgctatggactattggggccagggaacaagcgtgaccgtgtctagtacgcgtgaggacctgaagaacgtgttcccacctgaggtggccgtgttcgagcctagcaaggccgagatcgcccacacccagaaagccaccctcgtgtgcctggctaccggcttctaccccgaccatgtggaactgtcttggtgggtcaacggcaaagaggtgcacagcggcgtgtgtaccgacccccagccactgaaagaacagcccgccctgaacgacagccggtactgcctgagcagcagactgagagtgtccgccaccttctggcagaacccccggaaccacttcagatgccaggtgcagttctacggcctgagcgagaacgacgagtggacccaggacagagccaagcccgtgacccagatcgtgtctgccgaagcctggggcagagccgattgcggcatcaccagcgccagctaccaccagggcgtgctgagcgccaccatcctgtacgagatcctgctgggcaaggccaccctgtacgccgtgctggtgtctgccctggtgctgatggctatggtcaagcggaaggacagccggggaagggccaagcgatctggatctggagcaacaaacttctcactactcaaacaagcaggtgacgtggaggagaatcccgggccttctagaggccatatgaccgagtacaagcccacggtgcgcctcgccacccgcgacgacgtccccagggccgtacgcaccctcgccgccgcgttcgccgactaccccgccacgcgccacaccgtcgatccggaccgccacatcgagcgggtcaccgagctgcaagaactcttcctcacgcgcgtcgggctcgacatcggcaaggtgtgggtcgcggacgacggcgccgcggtggcggtctggaccacgccggagagcgtcgaagcgggggcggtgttcgccgagatcggcccgcgcatggccgagttgagcggttcccggctggccgcgcagcaacagatggaaggcctcctggcgccgcaccggcccaaggagcccgcgtggttcctggccaccgtcggcgtctcgcccgaccaccagggcaagggtctgggcagcgccgtcgtgctccccggagtggaggcggccgagcgcgccggggtgcccgccttcctggagacctccgcgccccgcaacctccccttctacgagcggctcggcttcaccgtcaccgccgacgtcgaggtgcccgaaggaccgcgcacctggtgcatgacccgcaagcccggtgcctga

SEQ ID NO: 22130 - DNA, 3405 bp, Artificial Sequence; identical to SEQ ID NO: 22123
  Synthetic Polynucleotide

SEQ ID NO: 22131 - DNA, 3405 bp, Artificial Sequence; identical to SEQ ID NO: 22123
  Synthetic Polynucleotide

SEQ ID NO: 22132 - DNA, 3405 bp, Artificial Sequence
  Synthetic Polynucleotide
atggccttaccagtgaccgccttgctcctgccgctggccttgctgctccacgccgccaggccggcatgcgaagtgcagctgcttgaaagtggcggcggactgattcagcctggcggatctctgagactgagctgtgccgccagcggcttcaccttttctagccacgccatgacctgggtccgacaggcacctggaaaagggcttgaatgggtgtccgccatcagcggctctggcgattacacacactacgccgacagcgtgaagggcagattcaccatcagcagagacaacagcaagaacaccgtgtacctccagatgaacagcctgagagccgaggacagcgccgtgtattattgcgccaaggatgaggatggcggcagcctgcttggacacagaggacaaggcaccctggtcaccgtttcttccggtaccggcggaggcggatctggcggcggaggtagcggtggcggaggatctgaattcgacatccagatgacacagagccctagcagcctgtctgccagcgtgggagacagagtgaccatcacatgcaaggccagcgaccacatcaacaactggctggcctggtatcagcagaagcctggacaggcccctaagctgctgatctacggcgctaccacactggaaacaggcgtgcccagcagattttctggcagcggctctggcaccgactacaccctgacaatatccagcctccagcctgaggacttcgccacctactactgtcagcagagctggaacaccccttggacattcggccagggcaccaagctggaaatcaagagactcgaggacctgaagaacgtgttcccacctgaggtggccgtgttcgagcctagcaaggccgagatcgcccacacccagaaagccaccctcgtgtgcctggctaccggcttctaccccgaccatgtggaactgtcttggtgggtcaacggcaaagaggtgcacagcggcgtgtgtaccgacccccagccactgaaagaacagcccgccctgaacgacagccggtactgcctgagcagcagactgagagtgtccgccaccttctggcagaacccccggaaccacttcagatgccaggtgcagttctacggcctgagcgagaacgacgagtggacccaggacagagccaagcccgtgacccagatcgtgtctgccgaagcctggggcagagccgattgcggcatcaccagcgccagctaccaccagggcgtgctgagcgccaccatcctgtacgagatcctgctgggcaaggccaccctgtacgccgtgctggtgtctgccctggtgctgatggctatggtcaagcggaaggacagccggggaagggccaagcgatctggatctggagcaacaaacttctcactactcaaacaagcaggtgacgtggaggagaatcccgggcctactagtgccaccatggactggatttggcgcatccttttccttgtcggcgctgctaccggcgcccattccgggcccgaagtgcagctggttgaatctggcggaggactggttcaggctggcggatctctgagactgtcttgtgccgccagcggcagaacctttagcatgggctggtttagacaggcccctggcaaagagagagagttcgtcgccgccatcacatactctggcggcagcccttactacgccgactctgtgaagggcagattcaccatcagccgggacaacgccaagaacaccgtgtacctccagatgaacagcctgaagcctgaggacaccgccgtgtactactgcgccgccaatccaacatacggcagcgactggaacgccgagaattggggccagggaacccaagtgacagtgtctagcggatccggcggcggaggatctggcggaggcggatctgggggcggaggctctttcgaacaagttcagcttcaacagcctggcgctgagctggtcaaacctggcgcttctgtgaagatgagctgcaaagccagcggctacgccttcagcagctactggatcaactggatgaagcagaaacccggccagggactcgaatggatcggccaaatctatcccggcgacggcgacaccaactacaacggcaagttcaagggcagagccacactgaccgccgatacctctagcagcacagcctacatgcagctgagcagcctgaccagcgaagatagcgccgtgtacttctgtgcccggtccatcacaacagtcgtgggctgcgctatggactattggggccagggaacaagcgtgaccgtgtctagtacgcgtatccagaaccctgatcctgccgtgtaccagctgcgggatagcaagagcagcgacaagagcgtgtgtctgttcaccgacttcgacagccagaccaacgtgtcccagagcaaggactccgacgtgtacatcaccgataagtgcgtgctggacatgcggagcatggacttcaagagcaactccgccgtggcctggtccaacaagtccgatttcgcctgcgccaacgccttcaacaacagcattatccccgaggacacattcttcccaagcagcgacgtgccctgcgacgtgaagctggtggaaaagagcttcgagacagacaccaacctgaacttccagaacctgagcgtgatcggcttcagaatcctgctgctgaaagtggccggctttaacctgctgatgaccctgcggctgtggtccagccgcgccaagagaagcggatctggcgtgaagcagaccctgaatttcgacctgctgaagctggctggcgacgtggaatccaacccaggcccttctagaggccatatgaccgagtacaagcccacggtgcgcctcgccacccgcgacgacgtccccagggccgtacgcaccctcgccgccgcgttcgccgactaccccgccacgcgccacaccgtcgatccggaccgccacatcgagcgggtcaccgagctgcaagaactcttcctcacgcgcgtcgggctcgacatcggcaaggtgtgggtcgcggacgacggcgccgcggtggcggtctggaccacgccggagagcgtcgaagcgggggcggtgttcgccgagatcggcccgcgcatggccgagttgagcggttcccggctggccgcgcagcaacagatggaaggcctcctggcgccgcaccggcccaaggagcccgcgtggttcctggccaccgtcggcgtctcgcccgaccaccagggcaagggtctgggcagcgccgtcgtgctccccggagtggaggcggccgagcgcgccggggtgcccgccttcctggagacctccgcgccccgcaacctccccttctacgagcggctcggcttcaccgtcaccgccgacgtcgaggtgcccgaaggaccgcgcacctggtgcatgacccgcaagcccggtgcctga

SEQ ID NO: 22133 - DNA, 3390 bp, Artificial Sequence; identical to SEQ ID NO: 22126
  Synthetic Polynucleotide

SEQ ID NO: 22134 - DNA, 3399 bp, Artificial Sequence
  Synthetic Polynucleotide
atggccttaccagtgaccgccttgctcctgccgctggccttgctgctccacgccgccaggccggcatgcgaagtgcaggttttggagtctggcggaggactggttcagcctggcggatctctgagactgtcttgtgccgccagcggcttcaccttcagcaactttgccatgagctgggtccgacaggcccctggcaaaggacttgaatgggtgtccacaatcagcggcagcgccggcacaacagattacgccgattctgtgaagggcagattcaccatcagccgggacaacagcaagaaaaccctgtacctccagatgaacagcctgcgcgtggaagataccgccgtgtactactgtgccgatggcagaggccccttcttcgattatcgcggccagggcacactggtcaccgtttcttctggtaccggcggaggcggatctggcggcggaggtagcggtggcggaggatctgaattcgacatccagatgacacagagccctagcagcctgtctgccagcgtgggagacagagtgaccatcacatgcaaggccagcgaccacatcaacaactggctggcctggtatcagcagaagcctggacaggcccctaagctgctgatctacggcgctaccacactggaaacaggcgtgcccagcagattttctggcagcggctctggcaccgactacaccctgacaatatccagcctccagcctgaggacttcgccacctactactgtcagcagagctggaacaccccttggacattcggccagggcaccaagctggaaatcaagagactcgaggacctgaagaacgtgttcccacctgaggtggccgtgttcgagcctagcaaggccgagatcgcccacacccagaaagccaccctcgtgtgcctggctaccggcttctaccccgaccatgtggaactgtcttggtgggtcaacggcaaagaggtgcacagcggcgtgtgtaccgacccccagccactgaaagaacagcccgccctgaacgacagccggtactgcctgagcagcagactgagagtgtccgccaccttctggcagaacccccggaaccacttcagatgccaggtgcagttctacggcctgagcgagaacgacgagtggacccaggacagagccaagcccgtgacccagatcgtgtctgccgaagcctggggcagagccgattgcggcatcaccagcgccagctaccaccagggcgtgctgagcgccaccatcctgtacgagatcctgctgggcaaggccaccctgtacgccgtgctggtgtctgccctggtgctgatggctatggtcaagcggaaggacagccggggaagggccaagcgatctggatctggagcaacaaacttctcactactcaaacaagcaggtgacgtggaggagaatcccgggcctactagtgccaccatggactggatttggcgcatccttttccttgtcggcgctgctaccggcgcccattccgggccccaggttcagctgcaagagtctggcggaggacttgctcaagctggcggaagcctgagactgtcttgtgccgcctctggcagaaccttcagcatgggctggtttagacaggcccctggcaaagagagagagttcgtcgccgccatcacatacagcggcggcagcccttactacgcctcttctgtcagaggccggttcaccatcagccgggacaacgccaagaacaccgtgtacctccagatgaacagcctgaagccagaggacaccgccgtgtactactgtgccgccaatccaacctacggcagcgactggaatgccgagaattggggccagggcacccaagtgacagtgtctagtggatccggcggcggaggatctggcggaggcggatctgggggcggaggctctttcgaacaagttcagcttcaacagcctggcgctgagctggtcaaacctggcgcttctgtgaagatgagctgcaaagccagcggctacgccttcagcagctactggatcaactggatgaagcagaaacccggccagggactcgaatggatcggccaaatctatcccggcgacggcgacaccaactacaacggcaagttcaagggcagagccacactgaccgccgatacctctagcagcacagcctacatgcagctgagcagcctgaccagcgaagatagcgccgtgtacttctgtgcccggtccatcacaacagtcgtgggctgcgctatggactattggggccagggaacaagcgtgaccgtgtctagtacgcgtatccagaaccctgatcctgccgtgtaccagctgcgggatagcaagagcagcgacaagagcgtgtgtctgttcaccgacttcgacagccagaccaacgtgtcccagagcaaggactccgacgtgtacatcaccgataagtgcgtgctggacatgcggagcatggacttcaagagcaactccgccgtggcctggtccaacaagtccgatttcgcctgcgccaacgccttcaacaacagcattatccccgaggacacattcttcccaagcagcgacgtgccctgcgacgtgaagctggtggaaaagagcttcgagacagacaccaacctgaacttccagaacctgagcgtgatcggcttcagaatcctgctgctgaaagtggccggctttaacctgctgatgaccctgcggctgtggtccagccgcgccaagagaagcggatctggcgtgaagcagaccctgaatttcgacctgctgaagctggctggcgacgtggaatccaacccaggcccttctagaggccatatgaccgagtacaagcccacggtgcgcctcgccacccgcgacgacgtccccagggccgtacgcaccctcgccgccgcgttcgccgactaccccgccacgcgccacaccgtcgatccggaccgccacatcgagcgggtcaccgagctgcaagaactcttcctcacgcgcgtcgggctcgacatcggcaaggtgtgggtcgcggacgacggcgccgcggtggcggtctggaccacgccggagagcgtcgaagcgggggcggtgttcgccgagatcggcccgcgcatggccgagttgagcggttcccggctggccgcgcagcaacagatggaaggcctcctggcgccgcaccggcccaaggagcccgcgtggttcctggccaccgtcggcgtctcgcccgaccaccagggcaagggtctgggcagcgccgtcgtgctccccggagtggaggcggccgagcgcgccggggtgcccgccttcctggagacctccgcgccccgcaacctccccttctacgagcggctcggcttcaccgtcaccgccgacgtcgaggtgcccgaaggaccgcgcacctggtgcatgacccgcaagcccggtgcctga

SEQ ID NO: 22135 - DNA, 3405 bp, Artificial Sequence
  Synthetic Polynucleotide
atggccttaccagtgaccgccttgctcctgccgctggccttgctgctccacgccgccaggccggcatgcgaagtgcagctgcttgaaagtggcggcggactgattcagcctggcggatctctgagactgagctgtgccgccagcggcttcaccttttctagccacgccatgacctgggtccgacaggcacctggaaaagggcttgaatgggtgtccgccatcagcggctctggcgattacacacactacgccgacagcgtgaagggcagattcaccatcagcagagacaacagcaagaacaccgtgtacctccagatgaacagcctgagagccgaggacagcgccgtgtattattgcgccaaggatgaggatggcggcagcctgcttggacacagaggacaaggcaccctggtcaccgtttcttccggtaccggcggaggcggatctggcggcggaggtagcggtggcggaggatctgaattcgacatccagatgacacagagccctagcagcctgtctgccagcgtgggagacagagtgaccatcacatgcaaggccagcgaccacatcaacaactggctggcctggtatcagcagaagcctggacaggcccctaagctgctgatctacggcgctaccacactggaaacaggcgtgcccagcagattttctggcagcggctctggcaccgactacaccctgacaatatccagcctccagcctgaggacttcgccacctactactgtcagcagagctggaacaccccttggacattcggccagggcaccaagctggaaatcaagagactcgaggacctgaagaacgtgttcccacctgaggtggccgtgttcgagcctagcgaggccgagatcagccacacccagaaagccaccctcgtgtgcctggctaccggcttctaccccgaccatgtggaactgtcttggtgggtcaacggcaaagaggtgcacagcggcgtgtgtaccgacccccagccactgaaagaacagcccgccctgaacgacagccggtactgcctgagcagcagactgagagtgtccgccaccttctggcagaacccccggaaccacttcagatgccaggtgcagttctacggcctgagcgagaacgacgagtggacccaggacagagccaagcccgtgacccagatcgtgtctgccgaagcctggggcagagccgattgcggctttaccagcgagagctaccagcagggcgtgctgagcgccaccatcctgtacgagatcctgctgggcaaggccaccctgtacgccgtgctggtgtctgccctggtgctgatggctatggtcaagcggaaggacagccggggaagggccaagcgatctggatctggagcaacaaacttctcactactcaaacaagcaggtgacgtggaggagaatcccgggcctactagtgccaccatggactggatttggcgcatccttttccttgtcggcgctgctaccggcgcccattccgggcccgaagtgcagctggttgaatctggcggaggactggttcaggctggcggatctctgagactgtcttgtgccgccagcggcagaacctttagcatgggctggtttagacaggcccctggcaaagagagagagttcgtcgccgccatcacatactctggcggcagcccttactacgccgactctgtgaagggcagattcaccatcagccgggacaacgccaagaacaccgtgtacctccagatgaacagcctgaagcctgaggacaccgccgtgtactactgcgccgccaatccaacatacggcagcgactggaacgccgagaattggggccagggaacccaagtgacagtgtctagcggatccggcggcggaggatctggcggaggcggatctgggggcggaggctctttcgaacaagttcagcttcaacagcctggcgctgagctggtcaaacctggcgcttctgtgaagatgagctgcaaagccagcggctacgccttcagcagctactggatcaactggatgaagcagaaacccggccagggactcgaatggatcggccaaatctatcccggcgacggcgacaccaactacaacggcaagttcaagggcagagccacactgaccgccgatacctctagcagcacagcctacatgcagctgagcagcctgaccagcgaagatagcgccgtgtacttctgtgcccggtccatcacaacagtcgtgggctgcgctatggactattggggccagggaacaagcgtgaccgtgtctagtacgcgtatccagaaccctgatcctgccgtgtaccagctgcgggatagcaagagcagcgacaagagcgtgtgtctgttcaccgacttcgacagccagaccaacgtgtcccagagcaaggactccgacgtgtacatcaccgataagtgcgtgctggacatgcggagcatggacttcaagagcaactccgccgtggcctggtccaacaagtccgatttcgcctgcgccaacgccttcaacaacagcattatccccgaggacacattcttcccaagccccgagagcagctgcgacgtgaagctggtggaaaagagcttcgagacagacaccaacctgaacttccagaacctgagcgtgatcggcttcagaatcctgctgctgaaagtggccggctttaacctgctgatgaccctgcggctgtggtccagccgcgccaagagaagcggatctggcgtgaagcagaccctgaatttcgacctgctgaagctggctggcgacgtggaatccaacccaggcccttctagaggccatatgaccgagtacaagcccacggtgcgcctcgccacccgcgacgacgtccccagggccgtacgcaccctcgccgccgcgttcgccgactaccccgccacgcgccacaccgtcgatccggaccgccacatcgagcgggtcaccgagctgcaagaactcttcctcacgcgcgtcgggctcgacatcggcaaggtgtgggtcgcggacgacggcgccgcggtggcggtctggaccacgccggagagcgtcgaagcgggggcggtgttcgccgagatcggcccgcgcatggccgagttgagcggttcccggctggccgcgcagcaacagatggaaggcctcctggcgccgcaccggcccaaggagcccgcgtggttcctggccaccgtcggcgtctcgcccgaccaccagggcaagggtctgggcagcgccgtcgtgctccccggagtggaggcggccgagcgcgccggggtgcccgccttcctggagacctccgcgccccgcaacctccccttctacgagcggctcggcttcaccgtcaccgccgacgtcgaggtgcccgaaggaccgcgcacctggtgcatgacccgcaagcccggtgcctga

SEQ ID NO: 22136 - DNA, 3396 bp, Artificial Sequence
  Synthetic Polynucleotide
atggccttaccagtgaccgccttgctcctgccgctggccttgctgctccacgccgccaggccggaagtgcagctggttgaatctggcggaggactggttcaggctggcggatctctgagactgtcttgtgccgccagcggcagaacctttagcatgggctggtttagacaggcccctggcaaagagagagagttcgtcgccgccatcacatactctggcggcagcccttactacgccgactctgtgaagggcagattcaccatcagccgggacaacgccaagaacaccgtgtacctccagatgaacagcctgaagcctgaggacaccgccgtgtactactgcgccgccaatccaacatacggcagcgactggaacgccgagaattggggccagggaacccaagtgacagtgtctagcggtaccggcggaggcggatctggcggcggaggtagcggtggcggaggatctgaattcgacatccagatgacacagagccctagcagcctgtctgccagcgtgggagacagagtgaccatcacatgcaaggccagcgaccacatcaacaactggctggcctggtatcagcagaagcctggacaggcccctaagctgctgatctacggcgctaccacactggaaacaggcgtgcccagcagattttctggcagcggctctggcaccgactacaccctgacaatatccagcctccagcctgaggacttcgccacctactactgtcagcagagctggaacaccccttggacattcggccagggcaccaagctggaaatcaagagactcgaggacctgaagaacgtgttcccacctgaggtggccgtgttcgagcctagcgaggccgagatcagccacacccagaaagccaccctcgtgtgcctggctaccggcttctaccccgaccatgtggaactgtcttggtgggtcaacggcaaagaggtgcacagcggcgtgtgtaccgacccccagccactgaaagaacagcccgccctgaacgacagccggtactgcctgagcagcagactgagagtgtccgccaccttctggcagaacccccggaaccacttcagatgccaggtgcagttctacggcctgagcgagaacgacgagtggacccaggacagagccaagcccgtgacccagatcgtgtctgccgaagcctggggcagagccgattgcggctttaccagcgagagctaccagcagggcgtgctgagcgccaccatcctgtacgagatcctgctgggcaaggccaccctgtacgccgtgctggtgtctgccctggtgctgatggctatggtcaagcggaaggacagccggggaagggccaagcgatctggatctggagcaacaaacttctcactactcaaacaagcaggtgacgtggaggagaatcccgggcctactagtgccaccatggactggatttggcgcatccttttccttgtcggcgctgctaccggcgcccattccgggccccaggttcagctgcaagagtctggcggaggacttgctcaagctggcggaagcctgagactgtcttgtgccgcctctggcagaaccttcagcatgggctggtttagacaggcccctggcaaagagagagagttcgtcgccgccatcacatacagcggcggcagcccttactacgcctcttctgtcagaggccggttcaccatcagccgggacaacgccaagaacaccgtgtacctccagatgaacagcctgaagccagaggacaccgccgtgtactactgtgccgccaatccaacctacggcagcgactggaatgccgagaattggggccagggcacccaagtgacagtgtctagtggatccggcggcggaggatctggcggaggcggatctgggggcggaggctctttcgaacaagttcagcttcaacagcctggcgctgagctggtcaaacctggcgcttctgtgaagatgagctgcaaagccagcggctacgccttcagcagctactggatcaactggatgaagcagaaacccggccagggactcgaatggatcggccaaatctatcccggcgacggcgacaccaactacaacggcaagttcaagggcagagccacactgaccgccgatacctctagcagcacagcctacatgcagctgagcagcctgaccagcgaagatagcgccgtgtacttctgtgcccggtccatcacaacagtcgtgggctgcgctatggactattggggccagggaacaagcgtgaccgtgtctagtacgcgtatccagaaccctgatcctgccgtgtaccagctgcgggatagcaagagcagcgacaagagcgtgtgtctgttcaccgacttcgacagccagaccaacgtgtcccagagcaaggactccgacgtgtacatcaccgataagtgcgtgctggacatgcggagcatggacttcaagagcaactccgccgtggcctggtccaacaagtccgatttcgcctgcgccaacgccttcaacaacagcattatccccgaggacacattcttcccaagccccgagagcagctgcgacgtgaagctggtggaaaagagcttcgagacagacaccaacctgaacttccagaacctgagcgtgatcggcttcagaatcctgctgctgaaagtggccggctttaacctgctgatgaccctgcggctgtggtccagccgcgccaagagaagcggatctggcgtgaagcagaccctgaatttcgacctgctgaagctggctggcgacgtggaatccaacccaggcccttctagaggccatatgaccgagtacaagcccacggtgcgcctcgccacccgcgacgacgtccccagggccgtacgcaccctcgccgccgcgttcgccgactaccccgccacgcgccacaccgtcgatccggaccgccacatcgagcgggtcaccgagctgcaagaactcttcctcacgcgcgtcgggctcgacatcggcaaggtgtgggtcgcggacgacggcgccgcggtggcggtctggaccacgccggagagcgtcgaagcgggggcggtgttcgccgagatcggcccgcgcatggccgagttgagcggttcccggctggccgcgcagcaacagatggaaggcctcctggcgccgcaccggcccaaggagcccgcgtggttcctggccaccgtcggcgtctcgcccgaccaccagggcaagggtctgggcagcgccgtcgtgctccccggagtggaggcggccgagcgcgccggggtgcccgccttcctggagacctccgcgccccgcaacctccccttctacgagcggctcggcttcaccgtcaccgccgacgtcgaggtgcccgaaggaccgcgcacctggtgcatgacccgcaagcccggtgcctga

SEQ ID NO: 22137 - DNA, 3405 bp, Artificial Sequence
  Synthetic Polynucleotide
atggccttaccagtgaccgccttgctcctgccgctggccttgctgctccacgccgccaggccggcatgccaagtcaaactggaagaaagcggtggcggcctggtgcaacctggcgaatctctgagactgagctgtagcgccagcggctccatcttcaaggtgttcagagtgttcgccatgagctggtacaggcaaggccctggcaagcagagagagctggtcgcctctatcagcagcggcgagacaaccacatacgccgaatctgtgaaaggccggttcaccatcagccgggataatgccaagaataccgcctatctccagatggactccctgaagcctgaagatacagctgtgtactactgcaacgccgaccataccttcaccggcgatttttggggccagggaacccaagtgaccgtgtctagtggtaccggcggaggcggatctggcggcggaggtagcggtggcggaggatctgaattcgacatccagatgacacagagccctagcagcctgtctgccagcgtgggagacagagtgaccatcacatgcaaggccagcgaccacatcaacaactggctggcctggtatcagcagaagcctggacaggcccctaagctgctgatctacggcgctaccacactggaaacaggcgtgcccagcagattttctggcagcggctctggcaccgactacaccctgacaatatccagcctccagcctgaggacttcgccacctactactgtcagcagagctggaacaccccttggacattcggccagggcaccaagctggaaatcaagagactcgaggacctgaagaacgtgttcccacctgaggtggccgtgttcgagcctagcaaggccgagatcgcccacacccagaaagccaccctcgtgtgcctggctaccggcttctaccccgaccatgtggaactgtcttggtgggtcaacggcaaagaggtgcacagcggcgtgtgtaccgacccccagccactgaaagaacagcccgccctgaacgacagccggtactgcctgagcagcagactgagagtgtccgccaccttctggcagaacccccggaaccacttcagatgccaggtgcagttctacggcctgagcgagaacgacgagtggacccaggacagagccaagcccgtgacccagatcgtgtctgccgaagcctggggcagagccgattgcggcatcaccagcgccagctaccaccagggcgtgctgagcgccaccatcctgtacgagatcctgctgggcaaggccaccctgtacgccgtgctggtgtctgccctggtgctgatggctatggtcaagcggaaggacagccggggaagggccaagcgatctggatctggagcaacaaacttctcactactcaaacaagcaggtgacgtggaggagaatcccgggcctactagtgccaccatggactggatttggcgcatccttttccttgtcggcgctgctaccggcgcccattccgggccccaggttcagctgcaagagtctggcggaggacttgctcaagctggcggaagcctgagactgtcttgtgccgcctctggcagaaccttcagcatgggctggtttagacaggcccctggcaaagagagagagttcgtcgccgccatcacatacagcggcggcagcccttactacgcctcttctgtcagaggccggttcaccatcagccgggacaacgccaagaacaccgtgtacctccagatgaacagcctgaagccagaggacaccgccgtgtactactgtgccgccaatccaacctacggcagcgactggaatgccgagaattggggccagggcacccaagtgacagtgtctagtggatccggcggcggaggatctggcggaggcggatctgggggcggaggctctttcgaacaagttcagcttcaacagcctggcgctgagctggtcaaacctggcgcttctgtgaagatgagctgcaaagccagcggctacgccttcagcagctactggatcaactggatgaagcagaaacccggccagggactcgaatggatcggccaaatctatcccggcgacggcgacaccaactacaacggcaagttcaagggcagagccacactgaccgccgatacctctagcagcacagcctacatgcagctgagcagcctgaccagcgaagatagcgccgtgtacttctgtgcccggtccatcacaacagtcgtgggctgcgctatggactattggggccagggaacaagcgtgaccgtgtctagtacgcgtatccagaaccctgatcctgccgtgtaccagctgcgggatagcaagagcagcgacaagagcgtgtgtctgttcaccgacttcgacagccagaccaacgtgtcccagagcaaggactccgacgtgtacatcaccgataagtgcgtgctggacatgcggagcatggacttcaagagcaactccgccgtggcctggtccaacaagtccgatttcgcctgcgccaacgccttcaacaacagcattatccccgaggacacattcttcccaagcagcgacgtgccctgcgacgtgaagctggtggaaaagagcttcgagacagacaccaacctgaacttccagaacctgagcgtgatcggcttcagaatcctgctgctgaaagtggccggctttaacctgctgatgaccctgcggctgtggtccagccgcgccaagagaagcggatctggcgtgaagcagaccctgaatttcgacctgctgaagctggctggcgacgtggaatccaacccaggcccttctagaggccatatgaccgagtacaagcccacggtgcgcctcgccacccgcgacgacgtccccagggccgtacgcaccctcgccgccgcgttcgccgactaccccgccacgcgccacaccgtcgatccggaccgccacatcgagcgggtcaccgagctgcaagaactcttcctcacgcgcgtcgggctcgacatcggcaaggtgtgggtcgcggacgacggcgccgcggtggcggtctggaccacgccggagagcgtcgaagcgggggcggtgttcgccgagatcggcccgcgcatggccgagttgagcggttcccggctggccgcgcagcaacagatggaaggcctcctggcgccgcaccggcccaaggagcccgcgtggttcctggccaccgtcggcgtctcgcccgaccaccagggcaagggtctgggcagcgccgtcgtgctccccggagtggaggcggccgagcgcgccggggtgcccgccttcctggagacctccgcgccccgcaacctccccttctacgagcggctcggcttcaccgtcaccgccgacgtcgaggtgcccgaaggaccgcgcacctggtgcatgacccgcaagcccggtgcctga

SEQ ID NO: 22138 - DNA, 3405 bp, Artificial Sequence
  Synthetic Polynucleotide
atggccttaccagtgaccgccttgctcctgccgctggccttgctgctccacgccgccaggccggcatgccaagtcaaactggaagaaagcggtggcggcctggtgcaacctggcgaatctctgagactgagctgtagcgccagcggctccatcttcaaggtgttcagagtgttcgccatgagctggtacaggcaaggccctggcaagcagagagagctggtcgccgagatcagcagcggcgagacaaccacatacgccgactctgtgaaaggccggttcaccatcagccgggataatgccaagaataccgcctatctccagatggactccctgaagcctgaagatacagctgtgtactactgcaacgccgaccataccttcaccggcgatttttggggccagggaacccaagtgaccgtgtctagtggtaccggcggaggcggatctggcggcggaggtagcggtggcggaggatctgaattcgacatccagatgacacagagccctagcagcctgtctgccagcgtgggagacagagtgaccatcacatgcaaggccagcgaccacatcaacaactggctggcctggtatcagcagaagcctggacaggcccctaagctgctgatctacggcgctaccacactggaaacaggcgtgcccagcagattttctggcagcggctctggcaccgactacaccctgacaatatccagcctccagcctgaggacttcgccacctactactgtcagcagagctggaacaccccttggacattcggccagggcaccaagctggaaatcaagagactcgaggacctgaagaacgtgttcccacctgaggtggccgtgttcgagcctagcaaggccgagatcgcccacacccagaaagccaccctcgtgtgcctggctaccggcttctaccccgaccatgtggaactgtcttggtgggtcaacggcaaagaggtgcacagcggcgtgtgtaccgacccccagccactgaaagaacagcccgccctgaacgacagccggtactgcctgagcagcagactgagagtgtccgccaccttctggcagaacccccggaaccacttcagatgccaggtgcagttctacggcctgagcgagaacgacgagtggacccaggacagagccaagcccgtgacccagatcgtgtctgccgaagcctggggcagagccgattgcggcatcaccagcgccagctaccaccagggcgtgctgagcgccaccatcctgtacgagatcctgctgggcaaggccaccctgtacgccgtgctggtgtctgccctggtgctgatggctatggtcaagcggaaggacagccggggaagggccaagcgatctggatctggagcaacaaacttctcactactcaaacaagcaggtgacgtggaggagaatcccgggcctactagtgccaccatggactggatttggcgcatccttttccttgtcggcgctgctaccggcgcccattccgggccccaggttcagctgcaagagtctggcggaggacttgctcaagctggcggaagcctgagactgtcttgtgccgcctctggcagaaccttcagcatgggctggtttagacaggcccctggcaaagagagagagttcgtcgccgccatcacatacagcggcggcagcccttactacgcctcttctgtcagaggccggttcaccatcagccgggacaacgccaagaacaccgtgtacctccagatgaacagcctgaagccagaggacaccgccgtgtactactgtgccgccaatccaacctacggcagcgactggaatgccgagaattggggccagggcacccaagtgacagtgtctagtggatccggcggcggaggatctggcggaggcggatctgggggcggaggctctttcgaacaagttcagcttcaacagcctggcgctgagctggtcaaacctggcgcttctgtgaagatgagctgcaaagccagcggctacgccttcagcagctactggatcaactggatgaagcagaaacccggccagggactcgaatggatcggccaaatctatcccggcgacggcgacaccaactacaacggcaagttcaagggcagagccacactgaccgccgatacctctagcagcacagcctacatgcagctgagcagcctgaccagcgaagatagcgccgtgtacttctgtgcccggtccatcacaacagtcgtgggctgcgctatggactattggggccagggaacaagcgtgaccgtgtctagtacgcgtatccagaaccctgatcctgccgtgtaccagctgcgggatagcaagagcagcgacaagagcgtgtgtctgttcaccgacttcgacagccagaccaacgtgtcccagagcaaggactccgacgtgtacatcaccgataagtgcgtgctggacatgcggagcatggacttcaagagcaactccgccgtggcctggtccaacaagtccgatttcgcctgcgccaacgccttcaacaacagcattatccccgaggacacattcttcccaagcagcgacgtgccctgcgacgtgaagctggtggaaaagagcttcgagacagacaccaacctgaacttccagaacctgagcgtgatcggcttcagaatcctgctgctgaaagtggccggctttaacctgctgatgaccctgcggctgtggtccagccgcgccaagagaagcggatctggcgtgaagcagaccctgaatttcgacctgctgaagctggctggcgacgtggaatccaacccaggcccttctagaggccatatgaccgagtacaagcccacggtgcgcctcgccacccgcgacgacgtccccagggccgtacgcaccctcgccgccgcgttcgccgactaccccgccacgcgccacaccgtcgatccggaccgccacatcgagcgggtcaccgagctgcaagaactcttcctcacgcgcgtcgggctcgacatcggcaaggtgtgggtcgcggacgacggcgccgcggtggcggtctggaccacgccggagagcgtcgaagcgggggcggtgttcgccgagatcggcccgcgcatggccgagttgagcggttcccggctggccgcgcagcaacagatggaaggcctcctggcgccgcaccggcccaaggagcccgcgtggttcctggccaccgtcggcgtctcgcccgaccaccagggcaagggtctgggcagcgccgtcgtgctccccggagtggaggcggccgagcgcgccggggtgcccgccttcctggagacctccgcgccccgcaacctccccttctacgagcggctcggcttcaccgtcaccgccgacgtcgaggtgcccgaaggaccgcgcacctggtgcatgacccgcaagcccggtgcctga

SEQ ID NO: 22139 - DNA, 3402 bp, Artificial Sequence
  Synthetic Polynucleotide
atggccttaccagtgaccgccttgctcctgccgctggccttgctgctccacgccgccaggccggcatgcgaagtgcagctgcttgaaagtggcggcggactgattcagcctggcggatctctgagactgagctgtgccgccagcggcttcaccttttctagccacgccatgacctgggtccgacaggcacctggaaaagggcttgaatgggtgtccgccatcagcggctctggcgattacacacactacgccgacagcgtgaagggcagattcaccatcagcagagacaacagcaagaacaccgtgtacctccagatgaacagcctgagagccgaggacagcgccgtgtattattgcgccaaggatgaggatggcggcagcctgcttggacacagaggacaaggcaccctggtcaccgtttcttccggtaccggcggaggcggatctggcggcggaggtagcggtggcggaggatctgaattcgacatccagatgacacagagccctagcagcctgtctgccagcgtgggagacagagtgaccatcacatgcaaggccagcgaccacatcaacaactggctggcctggtatcagcagaagcctggacaggcccctaagctgctgatctacggcgctaccacactggaaacaggcgtgcccagcagattttctggcagcggctctggcaccgactacaccctgacaatatccagcctccagcctgaggacttcgccacctactactgtcagcagagctggaacaccccttggacattcggccagggcaccaagctggaaatcaagagactcgaggccgacgtgtcccccaagcctaccatcttcctgccctctatcgccgagacaaagctccagaaggccggcacctacctgtgcctgctggaaaagttcttcccagatgtgattaagatccactggcaggaaaagaagtccaacaccatcctgggcagccaggaaggcaacaccatgaagaccaacgacacctacatgaagttcagctggctgaccgtgcccgagaagtccctggacaaagaacacagatgcatcgtgcggcacgaaaacaacaagaacggcgtggaccaggaaatcatcttcccacccatcaagaccgatgtgattacaatggaccccaaggacaactgctccaaggacgccaacgataccctgctgctccagctgaccaacaccagcgcctactacatgtacttgttgctgctgctgaagtccgtggtgtacttcgccatcatcacatgctgcctgctgcggagaaccgccttctgctgcaacggcgagaagtctagggccaagcgatctggatctggagcaacaaacttctcactactcaaacaagcaggtgacgtggaggagaatcccgggcctactagtatggactggatttggcgcatccttttccttgtcggcgctgctaccggcgcgcattccgggccccaggttcagctgcaagagtctggcggaggacttgctcaagctggcggaagcctgagactgtcttgtgccgcctctggcagaaccttcagcatgggctggtttagacaggcccctggcaaagagagagagttcgtcgccgccatcacatacagcggcggcagcccttactacgcctcttctgtcagaggccggttcaccatcagccgggacaacgccaagaacaccgtgtacctccagatgaacagcctgaagccagaggacaccgccgtgtactactgtgccgccaatccaacctacggcagcgactggaatgccgagaattggggccagggcacccaagtgacagtgtctagtggatccggcggcggaggatctggcggaggcggatctgggggcggaggctctttcgaacaagttcagcttcaacagcctggcgctgagctggtcaaacctggcgcttctgtgaagatgagctgcaaagccagcggctacgccttcagcagctactggatcaactggatgaagcagaaacccggccagggactcgaatggatcggccaaatctatcccggcgacggcgacaccaactacaacggcaagttcaagggcagagccacactgaccgccgatacctctagcagcacagcctacatgcagctgagcagcctgaccagcgaagatagcgccgtgtacttctgtgcccggtccatcacaacagtcgtgggctgcgctatggactattggggccagggaacaagcgtgaccgtgtctagtacgcgtcctcacaccaagcccagcgtgttcgtgatgaagaacggcaccaacgtggcctgcctcgtgaaagagttctaccccaaggacatcaggatcaacctggtgtccagcaagaagatcaccgagttcgaccccgccatcgtgatctcccccagcggcaagtacaacgccgtgaagctggggaagtacgaggacagcaacagcgtgacctgctccgtgcagcacgacaacaagaccgtgcacagcaccgactttgaagtgaaaaccgactccaccgaccacgtgaagcccaaagagacagagaacaccaagcagcccagcaagagctgccacaagcccaaggccatcgtgcacaccgagaaagtgaacatgatgagcctgaccgtgctgggcctgcggatgctgttcgccaaaaccgtggccgtgaacttcctgctgaccgccaagctgttcttcctccgcgccaagagaagcggatctggcgtgaagcagaccctgaatttcgacctgctgaagctggctggcgacgtggaatccaacccaggcccttctagaggccatatgaccgagtacaagcccacggtgcgcctcgccacccgcgacgacgtccccagggccgtacgcaccctcgccgccgcgttcgccgactaccccgccacgcgccacaccgtcgatccggaccgccacatcgagcgggtcaccgagctgcaagaactcttcctcacgcgcgtcgggctcgacatcggcaaggtgtgggtcgcggacgacggcgccgcggtggcggtctggaccacgccggagagcgtcgaagcgggggcggtgttcgccgagatcggcccgcgcatggccgagttgagcggttcccggctggccgcgcagcaacagatggaaggcctcctggcgccgcaccggcccaaggagcccgcgtggttcctggccaccgtcggcgtctcgcccgaccaccagggcaagggtctgggcagcgccgtcgtgctccccggagtggaggcggccgagcgcgccggggtgcccgccttcctggagacctccgcgccccgcaacctccccttctacgagcggctcggcttcaccgtcaccgccgacgtcgaggtgcccgaaggaccgcgcacctggtgcatgacccgcaagcccggtgcctga

SEQ ID NO: 22140 - DNA, 3417 bp, Artificial Sequence
  Synthetic Polynucleotide
atggccttaccagtgaccgccttgctcctgccgctggccttgctgctccacgccgccaggccggcatgcgaagtgcagctgcttgaaagtggcggcggactgattcagcctggcggatctctgagactgagctgtgccgccagcggcttcaccttttctagccacgccatgacctgggtccgacaggcacctggaaaagggcttgaatgggtgtccgccatcagcggctctggcgattacacacactacgccgacagcgtgaagggcagattcaccatcagcagagacaacagcaagaacaccgtgtacctccagatgaacagcctgagagccgaggacagcgccgtgtattattgcgccaaggatgaggatggcggcagcctgcttggacacagaggacaaggcaccctggtcaccgtttcttccggtaccggcggaggcggatctggcggcggaggtagcggtggcggaggatctgaattcgacatccagatgacacagagccctagcagcctgtctgccagcgtgggagacagagtgaccatcacatgcaaggccagcgaccacatcaacaactggctggcctggtatcagcagaagcctggacaggcccctaagctgctgatctacggcgctaccacactggaaacaggcgtgcccagcagattttctggcagcggctctggcaccgactacaccctgacaatatccagcctccagcctgaggacttcgccacctactactgtcagcagagctggaacaccccttggacattcggccagggcaccaagctggaaatcaagagactcgagggacagcctaaggccaatcctaccgtgacactgttccctccaagcagcgaagaactccaggccaacaaggccacacttgtgtgcctgatctccgacttctaccctggggctgtgacagtggcttggaaggccgatggatctcctgtgaaagccggcgtggaaaccaccaagccatccaagcagagcaacaacaaatacgccgccagctcctacctgagcctgacacctgagcagtggaagtcccacagatcctacagctgccaagtgacccacgaaggcagcaccgtggaaaagacagtggcccctacagagtgcagcggcagagccgattgcggctttaccagcgagagctaccagcagggcgtgctgagcgccaccatcctgtacgagatcctgctgggcaaggccaccctgtacgccgtgctggtgtctgccctggtgctgatggctatggtcaagcggaaggacagccggggaagggccaagcgatctggatctggagcaacaaacttctcactactcaaacaagcaggtgacgtggaggagaatcccgggcctactagtgccaccatggactggatttggcgcatccttttccttgtcggcgctgctaccggcgcccattccgggccccaggttcagctgcaagagtctggcggaggacttgctcaagctggcggaagcctgagactgtcttgtgccgcctctggcagaaccttcagcatgggctggtttagacaggcccctggcaaagagagagagttcgtcgccgccatcacatacagcggcggcagcccttactacgcctcttctgtcagaggccggttcaccatcagccgggacaacgccaagaacaccgtgtacctccagatgaacagcctgaagccagaggacaccgccgtgtactactgtgccgccaatccaacctacggcagcgactggaatgccgagaattggggccagggcacccaagtgacagtgtctagtggatccggcggcggaggatctggcggaggcggatctgggggcggaggctctttcgaacaagttcagcttcaacagcctggcgctgagctggtcaaacctggcgcttctgtgaagatgagctgcaaagccagcggctacgccttcagcagctactggatcaactggatgaagcagaaacccggccagggactcgaatggatcggccaaatctatcccggcgacggcgacaccaactacaacggcaagttcaagggcagagccacactgaccgccgatacctctagcagcacagcctacatgcagctgagcagcctgaccagcgaagatagcgccgtgtacttctgtgcccggtccatcacaacagtcgtgggctgcgctatggactattggggccagggaacaagcgtgaccgtgtctagtacgcgtgcctctacaaagggaccctccgtgtttcctctggctcccagcagcaagtctacaagcggaggaacagccgctctgggctgcctggtcaaggattactttcccgagcctgtgaccgtgtcctggaatagcggagcactgacaagcggcgtgcacacctttccagccgtgctgcaaagcagcggcctgtactctctgagcagcgtggtcacagtgcctagctctagcctgggcacccagacctacatctgcaatgtgaaccacaagcctagcaacaccaaggtggacaagagagtggaacccaagagctgtatccccgaggacacattcttcccaagccccgagagcagctgcgacgtgaagctggtggaaaagagcttcgagacagacaccaacctgaacttccagaacctgagcgtgatcggcttcagaatcctgctgctgaaagtggccggctttaacctgctgatgaccctgcggctgtggtccagccgcgccaagagaagcggatctggcgtgaagcagaccctgaatttcgacctgctgaagctggctggcgacgtggaatccaacccaggcccttctagaggccatatgaccgagtacaagcccacggtgcgcctcgccacccgcgacgacgtccccagggccgtacgcaccctcgccgccgcgttcgccgactaccccgccacgcgccacaccgtcgatccggaccgccacatcgagcgggtcaccgagctgcaagaactcttcctcacgcgcgtcgggctcgacatcggcaaggtgtgggtcgcggacgacggcgccgcggtggcggtctggaccacgccggagagcgtcgaagcgggggcggtgttcgccgagatcggcccgcgcatggccgagttgagcggttcccggctggccgcgcagcaacagatggaaggcctcctggcgccgcaccggcccaaggagcccgcgtggttcctggccaccgtcggcgtctcgcccgaccaccagggcaagggtctgggcagcgccgtcgtgctccccggagtggaggcggccgagcgcgccggggtgcccgccttcctggagacctccgcgccccgcaacctccccttctacgagcggctcggcttcaccgtcaccgccgacgtcgaggtgcccgaaggaccgcgcacctggtgcatgacccgcaagcccggtgcctga

SEQ ID NO: 22141 - DNA, 3483 bp, Artificial Sequence
  Synthetic Polynucleotide
atggccttaccagtgaccgccttgctcctgccgctggccttgctgctccacgccgccaggccggcatgcgaagtgcagctgcttgaaagtggcggcggactgattcagcctggcggatctctgagactgagctgtgccgccagcggcttcaccttttctagccacgccatgacctgggtccgacaggcacctggaaaagggcttgaatgggtgtccgccatcagcggctctggcgattacacacactacgccgacagcgtgaagggcagattcaccatcagcagagacaacagcaagaacaccgtgtacctccagatgaacagcctgagagccgaggacagcgccgtgtattattgcgccaaggatgaggatggcggcagcctgcttggacacagaggacaaggcaccctggtcaccgtttcttccggtaccggcggaggcggatctggcggcggaggtagcggtggcggaggatctgaattcgacatccagatgacacagagccctagcagcctgtctgccagcgtgggagacagagtgaccatcacatgcaaggccagcgaccacatcaacaactggctggcctggtatcagcagaagcctggacaggcccctaagctgctgatctacggcgctaccacactggaaacaggcgtgcccagcagattttctggcagcggctctggcaccgactacaccctgacaatatccagcctccagcctgaggacttcgccacctactactgtcagcagagctggaacaccccttggacattcggccagggcaccaagctggaaatcaagagactcgagggacagcctaaggccaatcctaccgtgacactgttccctccaagcagcgaagaactccaggccaacaaggccacacttgtgtgcctgatctccgacttctaccctggggctgtgacagtggcttggaaggccgatggatctcctgtgaaagccggcgtggaaaccaccaagccatccaagcagagcaacaacaaatacgccgccagctcctacctgagcctgacacctgagcagtggaagtcccacagatcctacagctgccaagtgacccacgaaggcagcaccgtggaaaagacagtggcccctacagagtgcagccccatcaagaccgatgtgattacaatggaccccaaggacaactgctccaaggacgccaacgataccctgctgctccagctgaccaacaccagcgcctactacatgtacttgttgctgctgctgaagtccgtggtgtacttcgccatcatcacatgctgcctgctgcggagaaccgccttctgctgcaacggcgagaagtctagggccaagcgatctggatctggagcaacaaacttctcactactcaaacaagcaggtgacgtggaggagaatcccgggcctactagtgccaccatggactggatttggcgcatccttttccttgtcggcgctgctaccggcgcccattccgggccccaggttcagctgcaagagtctggcggaggacttgctcaagctggcggaagcctgagactgtcttgtgccgcctctggcagaaccttcagcatgggctggtttagacaggcccctggcaaagagagagagttcgtcgccgccatcacatacagcggcggcagcccttactacgcctcttctgtcagaggccggttcaccatcagccgggacaacgccaagaacaccgtgtacctccagatgaacagcctgaagccagaggacaccgccgtgtactactgtgccgccaatccaacctacggcagcgactggaatgccgagaattggggccagggcacccaagtgacagtgtctagtggatccggcggcggaggatctggcggaggcggatctgggggcggaggctctttcgaacaagttcagcttcaacagcctggcgctgagctggtcaaacctggcgcttctgtgaagatgagctgcaaagccagcggctacgccttcagcagctactggatcaactggatgaagcagaaacccggccagggactcgaatggatcggccaaatctatcccggcgacggcgacaccaactacaacggcaagttcaagggcagagccacactgaccgccgatacctctagcagcacagcctacatgcagctgagcagcctgaccagcgaagatagcgccgtgtacttctgtgcccggtccatcacaacagtcgtgggctgcgctatggactattggggccagggaacaagcgtgaccgtgtctagtacgcgtgcctctacaaagggaccctccgtgtttcctctggctcccagcagcaagtctacaagcggaggaacagccgctctgggctgcctggtcaaggattactttcccgagcctgtgaccgtgtcctggaatagcggagcactgacaagcggcgtgcacacctttccagccgtgctgcaaagcagcggcctgtactctctgagcagcgtggtcacagtgcctagctctagcctgggcacccagacctacatctgcaatgtgaaccacaagcctagcaacaccaaggtggacaagagagtggaacccaagagctgtgaagtgaaaaccgactccaccgaccacgtgaagcccaaagagacagagaacaccaagcagcccagcaagagctgccacaagcccaaggccatcgtgcacaccgagaaagtgaacatgatgagcctgaccgtgctgggcctgcggatgctgttcgccaaaaccgtggccgtgaacttcctgctgaccgccaagctgttcttcctccgcgccaagagaagcggatctggcgtgaagcagaccctgaatttcgacctgctgaagctggctggcgacgtggaatccaacccaggcccttctagagcccatatgaccgagtacaagcccacggtgcgcctcgccacccgcgacgacgtccccagggccgtacgcaccctcgccgccgcgttcgccgactaccccgccacgcgccacaccgtcgatccggaccgccacatcgagcgggtcaccgagctgcaagaactcttcctcacgcgcgtcgggctcgacatcggcaaggtgtgggtcgcggacgacggcgccgcggtggcggtctggaccacgccggagagcgtcgaagcgggggcggtgttcgccgagatcggcccgcgcatggccgagttgagcggttcccggctggccgcgcagcaacagatggaaggcctcctggcgccgcaccggcccaaggagcccgcgtggttcctggccaccgtcggcgtctcgcccgaccaccagggcaagggtctgggcagcgccgtcgtgctccccggagtggaggcggccgagcgcgccggggtgcccgccttcctggagacctccgcgccccgcaacctccccttctacgagcggctcggcttcaccgtcaccgccgacgtcgaggtgcccgaaggaccgcgcacctggtgcatgacccgcaagcccggtgcctga

SEQ ID NO: 22142 - DNA, 3837 bp, Artificial Sequence
  Synthetic Polynucleotide
atggccttaccagtgaccgccttgctcctgccgctggccttgctgctccacgccgccaggccgcaggtgcagctggttgaatctggcggaggactggttcagcctggcggatctctgagactgtcttgtgccgccagcggcttcaccttcaccaatcacgccatgagctgggtccgacaggcccctggaaaaggactggaactggtgtctagcatcagcggcaacggcagaaccacctactacgccgatagcgtgaagggcagattcaccatcagccgggacatcagcaagaacaccctggacctccagatgaacagcctgagagccgaggataccgccgtgtactactgtgccaaggatggcggagagacactggtggatagcagaggccagggcacactggtcacagtgtcatctctcgaaggcggaggcggaagtggaggcggaggatctatcgaaggcggaggcggaagtggaggcggaggatctaaagttcagctgcttgagtctggcggaggactggttcaacctggcggaagcctgagactgtcttgtgccgccagcggcttcatcttcagcagctacgccatgagctgggtccgacaggctcctggaaagggccaagaatgggtttccggcgttagcggcacaggcgtgaacacctactacgccgatagcgtgaagggcagattcaccatcagccgggacaacagcaagaacaccctgtacctccagatgaacagcctgagagccgaggacaccgccgtgtactattgtgcctctggcaaaggctgggacagcggctcttggtacgaggactatagaggccagggcaccctggtcacagtttcttcaggtaccggcggaggcggatctggcggcggaggtagcggtggcggaggatctgaattcgacatccagatgacacagagccctagcagcctgtctgccagcgtgggagacagagtgaccatcacatgcaaggccagcgaccacatcaacaactggctggcctggtatcagcagaagcctggacaggcccctaagctgctgatctacggcgctaccacactggaaacaggcgtgcccagcagattttctggcagcggctctggcaccgactacaccctgacaatatccagcctccagcctgaggacttcgccacctactactgtcagcagagctggaacaccccttggacattcggccagggcaccaagctggaaatcaagagactcgagatccagaaccctgatcctgccgtgtaccagctgcgggatagcaagagcagcgacaagagcgtgtgtctgttcaccgacttcgacagccagaccaacgtgtcccagagcaaggactccgacgtgtacatcaccgataagtgcgtgctggacatgcggagcatggacttcaagagcaactccgccgtggcctggtccaacaagtccgatttcgcctgcgccaacgccttcaacaacagcattatccccgaggacacattcttcccaagcagcgacgtgccctgcgacgtgaagctggtggaaaagagcttcgagacagacaccaacctgaacttccagaacctgagcgtgatcggcttcagaatcctgctgctgaaagtggccggctttaacctgctgatgaccctgcggctgtggtccagccgcgccaagagaagcggatctggcgtgaagcagaccctgaatttcgacctgctgaagctggctggcgacgtggaatccaacccaggccctactagtgccaccatggactggatttggcgcatccttttccttgtcggcgctgctaccggcgcccattccgggccccaggttcagctgcaagagtctggcggaggacttgctcaagctggcggaagcctgagactgtcttgtgccgcctctggcagaaccttcagcatgggctggtttagacaggcccctggcaaagagagagagttcgtcgccgccatcacatacagcggcggcagcccttactacgcctcttctgtcagaggccggttcaccatcagccgggacaacgccaagaacaccgtgtacctccagatgaacagcctgaagccagaggacaccgccgtgtactactgtgccgccaatccaacctacggcagcgactggaatgccgagaattggggccagggcacccaagtgacagtgtctagtggatccggcggcggaggatctggcggaggcggatctgggggcggaggctctttcgaacaagttcagcttcaacagcctggcgctgagctggtcaaacctggcgcttctgtgaagatgagctgcaaagccagcggctacgccttcagcagctactggatcaactggatgaagcagaaacccggccagggactcgaatggatcggccaaatctatcccggcgacggcgacaccaactacaacggcaagttcaagggcagagccacactgaccgccgatacctctagcagcacagcctacatgcagctgagcagcctgaccagcgaagatagcgccgtgtacttctgtgcccggtccatcacaacagtcgtgggctgcgctatggactattggggccagggaacaagcgtgaccgtgtctagtacgcgtgaggacctgaagaacgtgttcccacctgaggtggccgtgttcgagcctagcaaggccgagatcgcccacacccagaaagccaccctcgtgtgcctggctaccggcttctaccccgaccatgtggaactgtcttggtgggtcaacggcaaagaggtgcacagcggcgtgtgtaccgacccccagccactgaaagaacagcccgccctgaacgacagccggtactgcctgagcagcagactgagagtgtccgccaccttctggcagaacccccggaaccacttcagatgccaggtgcagttctacggcctgagcgagaacgacgagtggacccaggacagagccaagcccgtgacccagatcgtgtctgccgaagcctggggcagagccgattgcggcatcaccagcgccagctaccaccagggcgtgctgagcgccaccatcctgtacgagatcctgctgggcaaggccaccctgtacgccgtgctggtgtctgccctggtgctgatggctatggtcaagcggaaggacagccggggaagggccaagcgatctggatctggagcaacaaacttctcactactcaaacaagcaggtgacgtggaggagaatcccgggccttctagaggccatatgaccgagtacaagcccacggtgcgcctcgccacccgcgacgacgtccccagggccgtacgcaccctcgccgccgcgttcgccgactaccccgccacgcgccacaccgtcgatccggaccgccacatcgagcgggtcaccgagctgcaagaactcttcctcacgcgcgtcgggctcgacatcggcaaggtgtgggtcgcggacgacggcgccgcggtggcggtctggaccacgccggagagcgtcgaagcgggggcggtgttcgccgagatcggcccgcgcatggccgagttgagcggttcccggctggccgcgcagcaacagatggaaggcctcctggcgccgcaccggcccaaggagcccgcgtggttcctggccaccgtcggcgtctcgcccgaccaccagggcaagggtctgggcagcgccgtcgtgctccccggagtggaggcggccgagcgcgccggggtgcccgccttcctggagacctccgcgccccgcaacctccccttctacgagcggctcggcttcaccgtcaccgccgacgtcgaggtgcccgaaggaccgcgcacctggtgcatgacccgcaagcccggtgcctga

SEQ ID NO: 22143 - DNA, 3834 bp, Artificial Sequence
  Synthetic Polynucleotide
atggccttaccagtgaccgccttgctcctgccgctggccttgctgctccacgccgccaggccgcaggtgcagctggttgaatctggcggaggactggttcagcctggcggatctctgagactgtcttgtgccgccagcggcttcaccttcaccaatcacgccatgagctgggtccgacaggcccctggaaaaggactggaactggtgtctagcatcagcggcaacggcagaaccacctactacgccgatagcgtgaagggcagattcaccatcagccgggacatcagcaagaacaccctggacctccagatgaacagcctgagagccgaggataccgccgtgtactactgtgccaaggatggcggagagacactggtggatagcagaggccagggcacactggtcacagtgtcatctctcgaaggcggaggcggaagtggaggcggaggatctatcgaaggcggaggcggaagtggaggcggaggatctaaagttcagctgcttgagtctggcggaggactggttcaacctggcggaagcctgagactgtcttgtgccgccagcggcttcatcttcagcagctacgccatgagctgggtccgacaggctcctggaaagggccaagaatgggtttccggcgttagcggcacaggcgtgaacacctactacgccgatagcgtgaagggcagattcaccatcagccgggacaacagcaagaacaccctgtacctccagatgaacagcctgagagccgaggacaccgccgtgtactattgtgcctctggcaaaggctgggacagcggctcttggtacgaggactatagaggccagggcaccctggtcacagtttcttcaggtaccggcggaggcggatctggcggcggaggtagcggtggcggaggatctgaattcgacatccagatgacacagagccctagcagcctgtctgccagcgtgggagacagagtgaccatcacatgcaaggccagcgaccacatcaacaactggctggcctggtatcagcagaagcctggacaggcccctaagctgctgatctacggcgctaccacactggaaacaggcgtgcccagcagattttctggcagcggctctggcaccgactacaccctgacaatatccagcctccagcctgaggacttcgccacctactactgtcagcagagctggaacaccccttggacattcggccagggcaccaagctggaaatcaagagactcgaggacctgaagaacgtgttcccacctgaggtggccgtgttcgagcctagcaaggccgagatcgcccacacccagaaagccaccctcgtgtgcctggctaccggcttctaccccgaccatgtggaactgtcttggtgggtcaacggcaaagaggtgcacagcggcgtgtgtaccgacccccagccactgaaagaacagcccgccctgaacgacagccggtactgcctgagcagcagactgagagtgtccgccaccttctggcagaacccccggaaccacttcagatgccaggtgcagttctacggcctgagcgagaacgacgagtggacccaggacagagccaagcccgtgacccagatcgtgtctgccgaagcctggggcagagccgattgcggcatcaccagcgccagctaccaccagggcgtgctgagcgccaccatcctgtacgagatcctgctgggcaaggccaccctgtacgccgtgctggtgtctgccctggtgctgatggctatggtcaagcggaaggacagccggggaagggccaagcgatctggatctggagcaacaaacttctcactactcaaacaagcaggtgacgtggaggagaatcccgggcctactagtgccaccatggactggatttggcgcatccttttccttgtcggcgctgctaccggcgcccattccgggccccaggttcagctgcaagagtctggcggaggacttgctcaagctggcggaagcctgagactgtcttgtgccgcctctggcagaaccttcagcatgggctggtttagacaggcccctggcaaagagagagagttcgtcgccgccatcacatacagcggcggcagcccttactacgcctcttctgtcagaggccggttcaccatcagccgggacaacgccaagaacaccgtgtacctccagatgaacagcctgaagccagaggacaccgccgtgtactactgtgccgccaatccaacctacggcagcgactggaatgccgagaattggggccagggcacccaagtgacagtgtctagtggatccggcggcggaggatctggcggaggcggatctgggggcggaggctctttcgaacaagttcagcttcaacagcctggcgctgagctggtcaaacctggcgcttctgtgaagatgagctgcaaagccagcggctacgccttcagcagctactggatcaactggatgaagcagaaacccggccagggactcgaatggatcggccaaatctatcccggcgacggcgacaccaactacaacggcaagttcaagggcagagccacactgaccgccgatacctctagcagcacagcctacatgcagctgagcagcctgaccagcgaagatagcgccgtgtacttctgtgcccggtccatcacaacagtcgtgggctgcgctatggactattggggccagggaacaagcgtgaccgtgtctagtacgcgtatccagaaccctgatcctgccgtgtaccagctgcgggatagcaagagcagcgacaagagcgtgtgtctgttcaccgacttcgacagccagaccaacgtgtcccagagcaaggactccgacgtgtacatcaccgataagtgcgtgctggacatgcggagcatggacttcaagagcaactccgccgtggcctggtccaacaagtccgatttcgcctgcgccaacgccttcaacaacagcattatccccgaggacacattcttcccaagcagcgacgtgccctgcgacgtgaagctggtggaaaagagcttcgagacagacaccaacctgaacttccagaacctgagcgtgatcggcttcagaatcctgctgctgaaagtggccggctttaacctgctgatgaccctgcggctgtggtccagccgcgccaagagaagcggatctggcgtgaagcagaccctgaatttcgacctgctgaagctggctggcgacgtggaatccaacccaggcccttctagaggccatatgaccgagtacaagcccacggtgcgcctcgccacccgcgacgacgtccccagggccgtacgcaccctcgccgccgcgttcgccgactaccccgccacgcgccacaccgtcgatccggaccgccacatcgagcgggtcaccgagctgcaagaactcttcctcacgcgcgtcgggctcgacatcggcaaggtgtgggtcgcggacgacggcgccgcggtggcggtctggaccacgccggagagcgtcgaagcgggggcggtgttcgccgagatcggcccgcgcatggccgagttgagcggttcccggctggccgcgcagcaacagatggaaggcctcctggcgccgcaccggcccaaggagcccgcgtggttcctggccaccgtcggcgtctcgcccgaccaccagggcaagggtctgggcagcgccgtcgtgctccccggagtggaggcggccgagcgcgccggggtgcccgccttcctggagacctccgcgccccgcaacctccccttctacgagcggctcggcttcaccgtcaccgccgacgtcgaggtgcccgaaggaccgcgcacctggtgcatgacccgcaagcccggtgcctga

SEQ ID NO: 22144 - DNA, 2895 bp, Artificial Sequence
  Synthetic Polynucleotide
atggccttaccagtgaccgccttgctcctgccgctggccttgctgctccacgccgccaggccgatgctgcccgctcctaagaatctggtggtgtccagaatcaccgaggacagcgccagactgtcttggacagctcctgatgccgccttcgacagcttccccatccggtacatcgagacactgatctggggcgaagccatctggctggatgtgcctggaagcgagagaagctacgacctgaccggactgaagcctggcacagagtatgccgtggtcatcaccggcgtgaaaggcggcagattctctagccctctggtggcctctttcaccaccggtaccggcggaggcggatctggcggcggaggtagcggtggcggaggatctgaattcgacatccagatgacacagagccctagcagcctgtctgccagcgtgggagacagagtgaccatcacctgtagagccagccaggacatcagcaactacctgaactggtatcagcagaaacccggcaaggccgtgaagctgctgatctactacaccagcatcctgcacagcggcgtgcccagcagattttctggctctggcagcggcaccgactacaccctgacaatatctagcctccagcctgaggacttcgctacctacttctgccagcaaggcaacaccctgccttggacatttggcggaggcaccaaggtggaaatcaaactcgaggacctgaagaacgtgttcccacctgaggtggccgtgttcgagcctagcgaggccgagatcagccacacccagaaagccaccctcgtgtgcctggctaccggcttctaccccgaccatgtggaactgtcttggtgggtcaacggcaaagaggtgcacagcggcgtgtgtaccgacccccagccactgaaagaacagcccgccctgaacgacagccggtactgcctgagcagcagactgagagtgtccgccaccttctggcagaacccccggaaccacttcagatgccaggtgcagttctacggcctgagcgagaacgacgagtggacccaggacagagccaagcccgtgacccagatcgtgtctgccgaagcctggggcagagccgattgcggctttaccagcgagagctaccagcagggcgtgctgagcgccaccatcctgtacgagatcctgctgggcaaggccaccctgtacgccgtgctggtgtctgccctggtgctgatggctatggtcaagcggaaggacagccggggaagggccaagcgatctggatctggagcaacaaacttctcactactcaaacaagcaggtgacgtggaggagaatcccgggcctactagtatggactggatttggcgcatccttttccttgtcggcgctgctaccggcgcgcattccttcgaagtgcagctggttgagtctggcggcggacttgtgaaacctggcggaagcctgaagctgagctgtgccgcttctggcttcgccttcagcatctacgacatgagctgggtccgacaggcccctggcaaaggacttgagtgggtcgcctacatcagctctggcggagggacaacctactatcccgacaccgtgaagggcagattcaccatcagccgggacaacgccaagaacaccctgtacctccagatgagcagcctgagagccgaggacaccgccatgtactactgtgccagacacagcggctacggcagctcttacggcgtgctgtttgcctattggggccagggcacactggtcaccgttagctctacgcgtatccagaaccctgatcctgccgtgtaccagctgcgggatagcaagagcagcgacaagagcgtgtgtctgttcaccgacttcgacagccagaccaacgtgtcccagagcaaggactccgacgtgtacatcaccgataagtgcgtgctggacatgcggagcatggacttcaagagcaactccgccgtggcctggtccaacaagtccgatttcgcctgcgccaacgccttcaacaacagcattatccccgaggacacattcttcccaagccccgagagcagctgcgacgtgaagctggtggaaaagagcttcgagacagacaccaacctgaacttccagaacctgagcgtgatcggcttcagaatcctgctgctgaaagtggccggctttaacctgctgatgaccctgcggctgtggtccagccgcgccaagagaagcggatctggcgtgaagcagaccctgaatttcgacctgctgaagctggctggcgacgtggaatccaacccaggcccttctagaggccatatgaccgagtacaagcccacggtgcgcctcgccacccgcgacgacgtccccagggccgtacgcaccctcgccgccgcgttcgccgactaccccgccacgcgccacaccgtcgatccggaccgccacatcgagcgggtcaccgagctgcaagaactcttcctcacgcgcgtcgggctcgacatcggcaaggtgtgggtcgcggacgacggcgccgcggtggcggtctggaccacgccggagagcgtcgaagcgggggcggtgttcgccgagatcggcccgcgcatggccgagttgagcggttcccggctggccgcgcagcaacagatggaaggcctcctggcgccgcaccggcccaaggagcccgcgtggttcctggccaccgtcggcgtctcgcccgaccaccagggcaagggtctgggcagcgccgtcgtgctccccggagtggaggcggccgagcgcgccggggtgcccgccttcctggagacctccgcgccccgcaacctccccttctacgagcggctcggcttcaccgtcaccgccgacgtcgaggtgcccgaaggaccgcgcacctggtgcatgacccgcaagcccggtgcctga

SEQ ID NO: 22145 - DNA, 3483 bp, Artificial Sequence
  Synthetic Polynucleotide
atggccttaccagtgaccgccttgctcctgccgctggccttgctgctccacgccgccaggccggcatgcgaagtgcagctgcttgaaagtggcggcggactgattcagcctggcggatctctgagactgagctgtgccgccagcggcttcaccttttctagccacgccatgacctgggtccgacaggcacctggaaaagggcttgaatgggtgtccgccatcagcggctctggcgattacacacactacgccgacagcgtgaagggcagattcaccatcagcagagacaacagcaagaacaccgtgtacctccagatgaacagcctgagagccgaggacagcgccgtgtattattgcgccaaggatgaggatggcggcagcctgcttggacacagaggacaaggcaccctggtcaccgtttcttccggtaccggcggaggcggatctggcggcggaggtagcggtggcggaggatctgaattcgacatccagatgacacagagccctagcagcctgtctgccagcgtgggagacagagtgaccatcacctgtagagccagccaggacatcagcaactacctgaactggtatcagcagaaacccggcaaggccgtgaagctgctgatctactacaccagcatcctgcacagcggcgtgcccagcagattttctggctctggcagcggcaccgactacaccctgacaatatctagcctccagcctgaggacttcgctacctacttctgccagcaaggcaacaccctgccttggacatttggcggaggcaccaaggtggaaatcaaactcgagggacagcctaaggccaatcctaccgtgacactgttccctccaagcagcgaagaactccaggccaacaaggccacacttgtgtgcctgatctccgacttctaccctggggctgtgacagtggcttggaaggccgatggatctcctgtgaaagccggcgtggaaaccaccaagccatccaagcagagcaacaacaaatacgccgccagctcctacctgagcctgacacctgagcagtggaagtcccacagatcctacagctgccaagtgacccacgaaggcagcaccgtggaaaagacagtggcccctacagagtgcagccccatcaagaccgatgtgattacaatggaccccaaggacaactgctccaaggacgccaacgataccctgctgctccagctgaccaacaccagcgcctactacatgtacttgttgctgctgctgaagtccgtggtgtacttcgccatcatcacatgctgcctgctgcggagaaccgccttctgctgcaacggcgagaagtctagggccaagcgatctggatctggagcaacaaacttctcactactcaaacaagcaggtgacgtggaggagaatcccgggcctactagtgccaccatggactggatttggcgcatccttttccttgtcggcgctgctaccggcgcccattccgggccccaggttcagctgcaagagtctggcggaggacttgctcaagctggcggaagcctgagactgtcttgtgccgcctctggcagaaccttcagcatgggctggtttagacaggcccctggcaaagagagagagttcgtcgccgccatcacatacagcggcggcagcccttactacgcctcttctgtcagaggccggttcaccatcagccgggacaacgccaagaacaccgtgtacctccagatgaacagcctgaagccagaggacaccgccgtgtactactgtgccgccaatccaacctacggcagcgactggaatgccgagaattggggccagggcacccaagtgacagtgtctagtggatccggcggcggaggatctggcggaggcggatctgggggcggaggctctttcgaagtgcagctggttgagtctggcggcggacttgtgaaacctggcggaagcctgaagctgagctgtgccgcttctggcttcgccttcagcatctacgacatgagctgggtccgacaggcccctggcaaaggacttgagtgggtcgcctacatcagctctggcggagggacaacctactatcccgacaccgtgaagggcagattcaccatcagccgggacaacgccaagaacaccctgtacctccagatgagcagcctgagagccgaggacaccgccatgtactactgtgccagacacagcggctacggcagctcttacggcgtgctgtttgcctattggggccagggcacactggtcaccgttagctctacgcgtgcctctacaaagggaccctccgtgtttcctctggctcccagcagcaagtctacaagcggaggaacagccgctctgggctgcctggtcaaggattactttcccgagcctgtgaccgtgtcctggaatagcggagcactgacaagcggcgtgcacacctttccagccgtgctgcaaagcagcggcctgtactctctgagcagcgtggtcacagtgcctagctctagcctgggcacccagacctacatctgcaatgtgaaccacaagcctagcaacaccaaggtggacaagagagtggaacccaagagctgtgaagtgaaaaccgactccaccgaccacgtgaagcccaaagagacagagaacaccaagcagcccagcaagagctgccacaagcccaaggccatcgtgcacaccgagaaagtgaacatgatgagcctgaccgtgctgggcctgcggatgctgttcgccaaaaccgtggccgtgaacttcctgctgaccgccaagctgttcttcctccgcgccaagagaagcggatctggcgtgaagcagaccctgaatttcgacctgctgaagctggctggcgacgtggaatccaacccaggcccttctagaggccatatgaccgagtacaagcccacggtgcgcctcgccacccgcgacgacgtccccagggccgtacgcaccctcgccgccgcgttcgccgactaccccgccacgcgccacaccgtcgatccggaccgccacatcgagcgggtcaccgagctgcaagaactcttcctcacgcgcgtcgggctcgacatcggcaaggtgtgggtcgcggacgacggcgccgcggtggcggtctggaccacgccggagagcgtcgaagcgggggcggtgttcgccgagatcggcccgcgcatggccgagttgagcggttcccggctggccgcgcagcaacagatggaaggcctcctggcgccgcaccggcccaaggagcccgcgtggttcctggccaccgtcggcgtctcgcccgaccaccagggcaagggtctgggcagcgccgtcgtgctccccggagtggaggcggccgagcgcgccggggtgcccgccttcctggagacctccgcgccccgcaacctccccttctacgagcggctcggcttcaccgtcaccgccgacgtcgaggtgcccgaaggaccgcgcacctggtgcatgacccgcaagcccggtgcctga

SEQ ID NO: 22146 - DNA, 3417 bp, Artificial Sequence
  Synthetic Polynucleotide
atggccttaccagtgaccgccttgctcctgccgctggccttgctgctccacgccgccaggccggcatgcgaagtgcagctgcttgaaagtggcggcggactgattcagcctggcggatctctgagactgagctgtgccgccagcggcttcaccttttctagccacgccatgacctgggtccgacaggcacctggaaaagggcttgaatgggtgtccgccatcagcggctctggcgattacacacactacgccgacagcgtgaagggcagattcaccatcagcagagacaacagcaagaacaccgtgtacctccagatgaacagcctgagagccgaggacagcgccgtgtattattgcgccaaggatgaggatggcggcagcctgcttggacacagaggacaaggcaccctggtcaccgtttcttccggtaccggcggaggcggatctggcggcggaggtagcggtggcggaggatctgaattcgacatccagatgacacagagccctagcagcctgtctgccagcgtgggagacagagtgaccatcacctgtagagccagccaggacatcagcaactacctgaactggtatcagcagaaacccggcaaggccgtgaagctgctgatctactacaccagcatcctgcacagcggcgtgcccagcagattttctggctctggcagcggcaccgactacaccctgacaatatctagcctccagcctgaggacttcgctacctacttctgccagcaaggcaacaccctgccttggacatttggcggaggcaccaaggtggaaatcaaactcgagggacagcctaaggccaatcctaccgtgacactgttccctccaagcagcgaagaactccaggccaacaaggccacacttgtgtgcctgatctccgacttctaccctggggctgtgacagtggcttggaaggccgatggatctcctgtgaaagccggcgtggaaaccaccaagccatccaagcagagcaacaacaaatacgccgccagctcctacctgagcctgacacctgagcagtggaagtcccacagatcctacagctgccaagtgacccacgaaggcagcaccgtggaaaagacagtggcccctacagagtgcagcggcagagccgattgcggctttaccagcgagagctaccagcagggcgtgctgagcgccaccatcctgtacgagatcctgctgggcaaggccaccctgtacgccgtgctggtgtctgccctggtgctgatggctatggtcaagcggaaggacagccggggaagggccaagcgatctggatctggagcaacaaacttctcactactcaaacaagcaggtgacgtggaggagaatcccgggcctactagtgccaccatggactggatttggcgcatccttttccttgtcggcgctgctaccggcgcccattccgggccccaggttcagctgcaagagtctggcggaggacttgctcaagctggcggaagcctgagactgtcttgtgccgcctctggcagaaccttcagcatgggctggtttagacaggcccctggcaaagagagagagttcgtcgccgccatcacatacagcggcggcagcccttactacgcctcttctgtcagaggccggttcaccatcagccgggacaacgccaagaacaccgtgtacctccagatgaacagcctgaagccagaggacaccgccgtgtactactgtgccgccaatccaacctacggcagcgactggaatgccgagaattggggccagggcacccaagtgacagtgtctagtggatccggcggcggaggatctggcggaggcggatctgggggcggaggctctttcgaagtgcagctggttgagtctggcggcggacttgtgaaacctggcggaagcctgaagctgagctgtgccgcttctggcttcgccttcagcatctacgacatgagctgggtccgacaggcccctggcaaaggacttgagtgggtcgcctacatcagctctggcggagggacaacctactatcccgacaccgtgaagggcagattcaccatcagccgggacaacgccaagaacaccctgtacctccagatgagcagcctgagagccgaggacaccgccatgtactactgtgccagacacagcggctacggcagctcttacggcgtgctgtttgcctattggggccagggcacactggtcaccgttagctctacgcgtgcctctacaaagggaccctccgtgtttcctctggctcccagcagcaagtctacaagcggaggaacagccgctctgggctgcctggtcaaggattactttcccgagcctgtgaccgtgtcctggaatagcggagcactgacaagcggcgtgcacacctttccagccgtgctgcaaagcagcggcctgtactctctgagcagcgtggtcacagtgcctagctctagcctgggcacccagacctacatctgcaatgtgaaccacaagcctagcaacaccaaggtggacaagagagtggaacccaagagctgtatccccgaggacacattcttcccaagccccgagagcagctgcgacgtgaagctggtggaaaagagcttcgagacagacaccaacctgaacttccagaacctgagcgtgatcggcttcagaatcctgctgctgaaagtggccggctttaacctgctgatgaccctgcggctgtggtccagccgcgccaagagaagcggatctggcgtgaagcagaccctgaatttcgacctgctgaagctggctggcgacgtggaatccaacccaggcccttctagaggccatatgaccgagtacaagcccacggtgcgcctcgccacccgcgacgacgtccccagggccgtacgcaccctcgccgccgcgttcgccgactaccccgccacgcgccacaccgtcgatccggaccgccacatcgagcgggtcaccgagctgcaagaactcttcctcacgcgcgtcgggctcgacatcggcaaggtgtgggtcgcggacgacggcgccgcggtggcggtctggaccacgccggagagcgtcgaagcgggggcggtgttcgccgagatcggcccgcgcatggccgagttgagcggttcccggctggccgcgcagcaacagatggaaggcctcctggcgccgcaccggcccaaggagcccgcgtggttcctggccaccgtcggcgtctcgcccgaccaccagggcaagggtctgggcagcgccgtcgtgctccccggagtggaggcggccgagcgcgccggggtgcccgccttcctggagacctccgcgccccgcaacctccccttctacgagcggctcggcttcaccgtcaccgccgacgtcgaggtgcccgaaggaccgcgcacctggtgcatgacccgcaagcccggtgcctga

SEQ ID NO: 22147 - DNA, 3402 bp, Artificial Sequence
  Synthetic Polynucleotide
atggccttaccagtgaccgccttgctcctgccgctggccttgctgctccacgccgccaggccggcatgcgaagtgcagctgcttgaaagtggcggcggactgattcagcctggcggatctctgagactgagctgtgccgccagcggcttcaccttttctagccacgccatgacctgggtccgacaggcacctggaaaagggcttgaatgggtgtccgccatcagcggctctggcgattacacacactacgccgacagcgtgaagggcagattcaccatcagcagagacaacagcaagaacaccgtgtacctccagatgaacagcctgagagccgaggacagcgccgtgtattattgcgccaaggatgaggatggcggcagcctgcttggacacagaggacaaggcaccctggtcaccgtttcttccggtaccggcggaggcggatctggcggcggaggtagcggtggcggaggatctgaattcgacatccagatgacacagagccctagcagcctgtctgccagcgtgggagacagagtgaccatcacctgtagagccagccaggacatcagcaactacctgaactggtatcagcagaaacccggcaaggccgtgaagctgctgatctactacaccagcatcctgcacagcggcgtgcccagcagattttctggctctggcagcggcaccgactacaccctgacaatatctagcctccagcctgaggacttcgctacctacttctgccagcaaggcaacaccctgccttggacatttggcggaggcaccaaggtggaaatcaaactcgaggccgacgtgtcccccaagcctaccatcttcctgccctctatcgccgagacaaagctccagaaggccggcacctacctgtgcctgctggaaaagttcttcccagatgtgattaagatccactggcaggaaaagaagtccaacaccatcctgggcagccaggaaggcaacaccatgaagaccaacgacacctacatgaagttcagctggctgaccgtgcccgagaagtccctggacaaagaacacagatgcatcgtgcggcacgaaaacaacaagaacggcgtggaccaggaaatcatcttcccacccatcaagaccgatgtgattacaatggaccccaaggacaactgctccaaggacgccaacgataccctgctgctccagctgaccaacaccagcgcctactacatgtacttgttgctgctgctgaagtccgtggtgtacttcgccatcatcacatgctgcctgctgcggagaaccgccttctgctgcaacggcgagaagtctagggccaagcgatctggatctggagcaacaaacttctcactactcaaacaagcaggtgacgtggaggagaatcccgggcctactagtatggactggatttggcgcatccttttccttgtcggcgctgctaccggcgcgcattccgggccccaggttcagctgcaagagtctggcggaggacttgctcaagctggcggaagcctgagactgtcttgtgccgcctctggcagaaccttcagcatgggctggtttagacaggcccctggcaaagagagagagttcgtcgccgccatcacatacagcggcggcagcccttactacgcctcttctgtcagaggccggttcaccatcagccgggacaacgccaagaacaccgtgtacctccagatgaacagcctgaagccagaggacaccgccgtgtactactgtgccgccaatccaacctacggcagcgactggaatgccgagaattggggccagggcacccaagtgacagtgtctagtggatccggcggcggaggatctggcggaggcggatctgggggcggaggctctttcgaagtgcagctggttgagtctggcggcggacttgtgaaacctggcggaagcctgaagctgagctgtgccgcttctggcttcgccttcagcatctacgacatgagctgggtccgacaggcccctggcaaaggacttgagtgggtcgcctacatcagctctggcggagggacaacctactatcccgacaccgtgaagggcagattcaccatcagccgggacaacgccaagaacaccctgtacctccagatgagcagcctgagagccgaggacaccgccatgtactactgtgccagacacagcggctacggcagctcttacggcgtgctgtttgcctattggggccagggcacactggtcaccgttagctctacgcgtcctcacaccaagcccagcgtgttcgtgatgaagaacggcaccaacgtggcctgcctcgtgaaagagttctaccccaaggacatcaggatcaacctggtgtccagcaagaagatcaccgagttcgaccccgccatcgtgatctcccccagcggcaagtacaacgccgtgaagctggggaagtacgaggacagcaacagcgtgacctgctccgtgcagcacgacaacaagaccgtgcacagcaccgactttgaagtgaaaaccgactccaccgaccacgtgaagcccaaagagacagagaacaccaagcagcccagcaagagctgccacaagcccaaggccatcgtgcacaccgagaaagtgaacatgatgagcctgaccgtgctgggcctgcggatgctgttcgccaaaaccgtggccgtgaacttcctgctgaccgccaagctgttcttcctccgcgccaagagaagcggatctggcgtgaagcagaccctgaatttcgacctgctgaagctggctggcgacgtggaatccaacccaggcccttctagaggccatatgaccgagtacaagcccacggtgcgcctcgccacccgcgacgacgtccccagggccgtacgcaccctcgccgccgcgttcgccgactaccccgccacgcgccacaccgtcgatccggaccgccacatcgagcgggtcaccgagctgcaagaactcttcctcacgcgcgtcgggctcgacatcggcaaggtgtgggtcgcggacgacggcgccgcggtggcggtctggaccacgccggagagcgtcgaagcgggggcggtgttcgccgagatcggcccgcgcatggccgagttgagcggttcccggctggccgcgcagcaacagatggaaggcctcctggcgccgcaccggcccaaggagcccgcgtggttcctggccaccgtcggcgtctcgcccgaccaccagggcaagggtctgggcagcgccgtcgtgctccccggagtggaggcggccgagcgcgccggggtgcccgccttcctggagacctccgcgccccgcaacctccccttctacgagcggctcggcttcaccgtcaccgccgacgtcgaggtgcccgaaggaccgcgcacctggtgcatgacccgcaagcccggtgcctga

SEQ ID NO: 22148 - DNA, 3471 bp, Artificial Sequence
  Synthetic Polynucleotide
atggccttaccagtgaccgccttgctcctgccgctggccttgctgctccacgccgccaggccggcatgcgaagtgcagctgcttgaaagtggcggcggactgattcagcctggcggatctctgagactgagctgtgccgccagcggcttcaccttttctagccacgccatgacctgggtccgacaggcacctggaaaagggcttgaatgggtgtccgccatcagcggctctggcgattacacacactacgccgacagcgtgaagggcagattcaccatcagcagagacaacagcaagaacaccgtgtacctccagatgaacagcctgagagccgaggacagcgccgtgtattattgcgccaaggatgaggatggcggcagcctgcttggacacagaggacaaggcaccctggtcaccgtttcttccggtaccggcggaggcggatctggcggcggaggtagcggtggcggaggatctgaattcgacgtggtcatgacacagagcccttctagcctgtctgccagcgtgggcgacagagtgaccatcacctgtatggcctccgaggacatctacatccggctggcctggtatcagcagaagcctggaaacgcccctaagctgctgatctacgccgccacctctctggaaacaggcgtgccaagcagattttccggcagcggctctggcaccgatttcaccctgacaatatccagcctccagcctgaggacttcgccacctactactgccagcagtattggagcagcccctggacatttggcggaggcaccaaggtggaaatcaaactcgagggacagcctaaggccaatcctaccgtgacactgttccctccaagcagcgaagaactccaggccaacaaggccacacttgtgtgcctgatctccgacttctaccctggggctgtgacagtggcttggaaggccgatggatctcctgtgaaagccggcgtggaaaccaccaagccatccaagcagagcaacaacaaatacgccgccagctcctacctgagcctgacacctgagcagtggaagtcccacagatcctacagctgccaagtgacccacgaaggcagcaccgtggaaaagacagtggcccctacagagtgcagccccatcaagaccgatgtgattacaatggaccccaaggacaactgctccaaggacgccaacgataccctgctgctccagctgaccaacaccagcgcctactacatgtacttgttgctgctgctgaagtccgtggtgtacttcgccatcatcacatgctgcctgctgcggagaaccgccttctgctgcaacggcgagaagtctagggccaagcgatctggatctggagcaacaaacttctcactactcaaacaagcaggtgacgtggaggagaatcccgggcctactagtgccaccatggactggatttggcgcatccttttccttgtcggcgctgctaccggcgcccattccgggccccaggttcagctgcaagagtctggcggaggacttgctcaagctggcggaagcctgagactgtcttgtgccgcctctggcagaaccttcagcatgggctggtttagacaggcccctggcaaagagagagagttcgtcgccgccatcacatacagcggcggcagcccttactacgcctcttctgtcagaggccggttcaccatcagccgggacaacgccaagaacaccgtgtacctccagatgaacagcctgaagccagaggacaccgccgtgtactactgtgccgccaatccaacctacggcagcgactggaatgccgagaattggggccagggcacccaagtgacagtgtctagtggatccggcggcggaggatctggcggaggcggatctgggggcggaggctctttcgaacaggttcagctgcaagagtctggccccggactggtcaagcctagccaaacactgagcctgacctgtaccgtgtccggctacagcatcaccagcgactacacctggaactggatcagacagcctcctggcaacggactggaatggatcggctacatcacctacagcggcagcaccagctacaaccccagcctgaaaagccgggtgctgatctccgtggacaccagcaagaatcaggtgtccctgaagctgagcagcgtgacagccgctgataccgccgtgtactactgtgccagactggggagaagatacacaatggactactggggccagggcaccaccgtgacagtttcttctacgcgtgcctctacaaagggaccctccgtgtttcctctggctcccagcagcaagtctacaagcggaggaacagccgctctgggctgcctggtcaaggattactttcccgagcctgtgaccgtgtcctggaatagcggagcactgacaagcggcgtgcacacctttccagccgtgctgcaaagcagcggcctgtactctctgagcagcgtggtcacagtgcctagctctagcctgggcacccagacctacatctgcaatgtgaaccacaagcctagcaacaccaaggtggacaagagagtggaacccaagagctgtgaagtgaaaaccgactccaccgaccacgtgaagcccaaagagacagagaacaccaagcagcccagcaagagctgccacaagcccaaggccatcgtgcacaccgagaaagtgaacatgatgagcctgaccgtgctgggcctgcggatgctgttcgccaaaaccgtggccgtgaacttcctgctgaccgccaagctgttcttcctccgcgccaagagaagcggatctggcgtgaagcagaccctgaatttcgacctgctgaagctggctggcgacgtggaatccaacccaggcccttctagaggccatatgaccgagtacaagcccacggtgcgcctcgccacccgcgacgacgtccccagggccgtacgcaccctcgccgccgcgttcgccgactaccccgccacgcgccacaccgtcgatccggaccgccacatcgagcgggtcaccgagctgcaagaactcttcctcacgcgcgtcgggctcgacatcggcaaggtgtgggtcgcggacgacggcgccgcggtggcggtctggaccacgccggagagcgtcgaagcgggggcggtgttcgccgagatcggcccgcgcatggccgagttgagcggttcccggctggccgcgcagcaacagatggaaggcctcctggcgccgcaccggcccaaggagcccgcgtggttcctggccaccgtcggcgtctcgcccgaccaccagggcaagggtctgggcagcgccgtcgtgctccccggagtggaggcggccgagcgcgccggggtgcccgccttcctggagacctccgcgccccgcaacctccccttctacgagcggctcggcttcaccgtcaccgccgacgtcgaggtgcccgaaggaccgcgcacctggtgcatgacccgcaagcccggtgcctga

SEQ ID NO: 22149 - DNA, 3405 bp, Artificial Sequence
  Synthetic Polynucleotide
atggccttaccagtgaccgccttgctcctgccgctggccttgctgctccacgccgccaggccggcatgcgaagtgcagctgcttgaaagtggcggcggactgattcagcctggcggatctctgagactgagctgtgccgccagcggcttcaccttttctagccacgccatgacctgggtccgacaggcacctggaaaagggcttgaatgggtgtccgccatcagcggctctggcgattacacacactacgccgacagcgtgaagggcagattcaccatcagcagagacaacagcaagaacaccgtgtacctccagatgaacagcctgagagccgaggacagcgccgtgtattattgcgccaaggatgaggatggcggcagcctgcttggacacagaggacaaggcaccctggtcaccgtttcttccggtaccggcggaggcggatctggcggcggaggtagcggtggcggaggatctgaattcgacgtggtcatgacacagagcccttctagcctgtctgccagcgtgggcgacagagtgaccatcacctgtatggcctccgaggacatctacatccggctggcctggtatcagcagaagcctggaaacgcccctaagctgctgatctacgccgccacctctctggaaacaggcgtgccaagcagattttccggcagcggctctggcaccgatttcaccctgacaatatccagcctccagcctgaggacttcgccacctactactgccagcagtattggagcagcccctggacatttggcggaggcaccaaggtggaaatcaaactcgagggacagcctaaggccaatcctaccgtgacactgttccctccaagcagcgaagaactccaggccaacaaggccacacttgtgtgcctgatctccgacttctaccctggggctgtgacagtggcttggaaggccgatggatctcctgtgaaagccggcgtggaaaccaccaagccatccaagcagagcaacaacaaatacgccgccagctcctacctgagcctgacacctgagcagtggaagtcccacagatcctacagctgccaagtgacccacgaaggcagcaccgtggaaaagacagtggcccctacagagtgcagcggcagagccgattgcggctttaccagcgagagctaccagcagggcgtgctgagcgccaccatcctgtacgagatcctgctgggcaaggccaccctgtacgccgtgctggtgtctgccctggtgctgatggctatggtcaagcggaaggacagccggggaagggccaagcgatctggatctggagcaacaaacttctcactactcaaacaagcaggtgacgtggaggagaatcccgggcctactagtgccaccatggactggatttggcgcatccttttccttgtcggcgctgctaccggcgcccattccgggccccaggttcagctgcaagagtctggcggaggacttgctcaagctggcggaagcctgagactgtcttgtgccgcctctggcagaaccttcagcatgggctggtttagacaggcccctggcaaagagagagagttcgtcgccgccatcacatacagcggcggcagcccttactacgcctcttctgtcagaggccggttcaccatcagccgggacaacgccaagaacaccgtgtacctccagatgaacagcctgaagccagaggacaccgccgtgtactactgtgccgccaatccaacctacggcagcgactggaatgccgagaattggggccagggcacccaagtgacagtgtctagtggatccggcggcggaggatctggcggaggcggatctgggggcggaggctctttcgaacaggttcagctgcaagagtctggccccggactggtcaagcctagccaaacactgagcctgacctgtaccgtgtccggctacagcatcaccagcgactacacctggaactggatcagacagcctcctggcaacggactggaatggatcggctacatcacctacagcggcagcaccagctacaaccccagcctgaaaagccgggtgctgatctccgtggacaccagcaagaatcaggtgtccctgaagctgagcagcgtgacagccgctgataccgccgtgtactactgtgccagactggggagaagatacacaatggactactggggccagggcaccaccgtgacagtttcttctacgcgtgcctctacaaagggaccctccgtgtttcctctggctcccagcagcaagtctacaagcggaggaacagccgctctgggctgcctggtcaaggattactttcccgagcctgtgaccgtgtcctggaatagcggagcactgacaagcggcgtgcacacctttccagccgtgctgcaaagcagcggcctgtactctctgagcagcgtggtcacagtgcctagctctagcctgggcacccagacctacatctgcaatgtgaaccacaagcctagcaacaccaaggtggacaagagagtggaacccaagagctgtatccccgaggacacattcttcccaagccccgagagcagctgcgacgtgaagctggtggaaaagagcttcgagacagacaccaacctgaacttccagaacctgagcgtgatcggcttcagaatcctgctgctgaaagtggccggctttaacctgctgatgaccctgcggctgtggtccagccgcgccaagagaagcggatctggcgtgaagcagaccctgaatttcgacctgctgaagctggctggcgacgtggaatccaacccaggcccttctagaggccatatgaccgagtacaagcccacggtgcgcctcgccacccgcgacgacgtccccagggccgtacgcaccctcgccgccgcgttcgccgactaccccgccacgcgccacaccgtcgatccggaccgccacatcgagcgggtcaccgagctgcaagaactcttcctcacgcgcgtcgggctcgacatcggcaaggtgtgggtcgcggacgacggcgccgcggtggcggtctggaccacgccggagagcgtcgaagcgggggcggtgttcgccgagatcggcccgcgcatggccgagttgagcggttcccggctggccgcgcagcaacagatggaaggcctcctggcgccgcaccggcccaaggagcccgcgtggttcctggccaccgtcggcgtctcgcccgaccaccagggcaagggtctgggcagcgccgtcgtgctccccggagtggaggcggccgagcgcgccggggtgcccgccttcctggagacctccgcgccccgcaacctccccttctacgagcggctcggcttcaccgtcaccgccgacgtcgaggtgcccgaaggaccgcgcacctggtgcatgacccgcaagcccggtgcctga

SEQ ID NO: 22150 - DNA, 3390 bp, Artificial Sequence
  Synthetic Polynucleotide
atggccttaccagtgaccgccttgctcctgccgctggccttgctgctccacgccgccaggccggcatgcgaagtgcagctgcttgaaagtggcggcggactgattcagcctggcggatctctgagactgagctgtgccgccagcggcttcaccttttctagccacgccatgacctgggtccgacaggcacctggaaaagggcttgaatgggtgtccgccatcagcggctctggcgattacacacactacgccgacagcgtgaagggcagattcaccatcagcagagacaacagcaagaacaccgtgtacctccagatgaacagcctgagagccgaggacagcgccgtgtattattgcgccaaggatgaggatggcggcagcctgcttggacacagaggacaaggcaccctggtcaccgtttcttccggtaccggcggaggcggatctggcggcggaggtagcggtggcggaggatctgaattcgacgtggtcatgacacagagcccttctagcctgtctgccagcgtgggcgacagagtgaccatcacctgtatggcctccgaggacatctacatccggctggcctggtatcagcagaagcctggaaacgcccctaagctgctgatctacgccgccacctctctggaaacaggcgtgccaagcagattttccggcagcggctctggcaccgatttcaccctgacaatatccagcctccagcctgaggacttcgccacctactactgccagcagtattggagcagcccctggacatttggcggaggcaccaaggtggaaatcaaactcgaggccgacgtgtcccccaagcctaccatcttcctgccctctatcgccgagacaaagctccagaaggccggcacctacctgtgcctgctggaaaagttcttcccagatgtgattaagatccactggcaggaaaagaagtccaacaccatcctgggcagccaggaaggcaacaccatgaagaccaacgacacctacatgaagttcagctggctgaccgtgcccgagaagtccctggacaaagaacacagatgcatcgtgcggcacgaaaacaacaagaacggcgtggaccaggaaatcatcttcccacccatcaagaccgatgtgattacaatggaccccaaggacaactgctccaaggacgccaacgataccctgctgctccagctgaccaacaccagcgcctactacatgtacttgttgctgctgctgaagtccgtggtgtacttcgccatcatcacatgctgcctgctgcggagaaccgccttctgctgcaacggcgagaagtctagggccaagcgatctggatctggagcaacaaacttctcactactcaaacaagcaggtgacgtggaggagaatcccgggcctactagtatggactggatttggcgcatccttttccttgtcggcgctgctaccggcgcgcattccgggccccaggttcagctgcaagagtctggcggaggacttgctcaagctggcggaagcctgagactgtcttgtgccgcctctggcagaaccttcagcatgggctggtttagacaggcccctggcaaagagagagagttcgtcgccgccatcacatacagcggcggcagcccttactacgcctcttctgtcagaggccggttcaccatcagccgggacaacgccaagaacaccgtgtacctccagatgaacagcctgaagccagaggacaccgccgtgtactactgtgccgccaatccaacctacggcagcgactggaatgccgagaattggggccagggcacccaagtgacagtgtctagtggatccggcggcggaggatctggcggaggcggatctgggggcggaggctctttcgaacaggttcagctgcaagagtctggccccggactggtcaagcctagccaaacactgagcctgacctgtaccgtgtccggctacagcatcaccagcgactacacctggaactggatcagacagcctcctggcaacggactggaatggatcggctacatcacctacagcggcagcaccagctacaaccccagcctgaaaagccgggtgctgatctccgtggacaccagcaagaatcaggtgtccctgaagctgagcagcgtgacagccgctgataccgccgtgtactactgtgccagactggggagaagatacacaatggactactggggccagggcaccaccgtgacagtttcttctacgcgtcctcacaccaagcccagcgtgttcgtgatgaagaacggcaccaacgtggcctgcctcgtgaaagagttctaccccaaggacatcaggatcaacctggtgtccagcaagaagatcaccgagttcgaccccgccatcgtgatctcccccagcggcaagtacaacgccgtgaagctggggaagtacgaggacagcaacagcgtgacctgctccgtgcagcacgacaacaagaccgtgcacagcaccgactttgaagtgaaaaccgactccaccgaccacgtgaagcccaaagagacagagaacaccaagcagcccagcaagagctgccacaagcccaaggccatcgtgcacaccgagaaagtgaacatgatgagcctgaccgtgctgggcctgcggatgctgttcgccaaaaccgtggccgtgaacttcctgctgaccgccaagctgttcttcctccgcgccaagagaagcggatctggcgtgaagcagaccctgaatttcgacctgctgaagctggctggcgacgtggaatccaacccaggcccttctagaggccatatgaccgagtacaagcccacggtgcgcctcgccacccgcgacgacgtccccagggccgtacgcaccctcgccgccgcgttcgccgactaccccgccacgcgccacaccgtcgatccggaccgccacatcgagcgggtcaccgagctgcaagaactcttcctcacgcgcgtcgggctcgacatcggcaaggtgtgggtcgcggacgacggcgccgcggtggcggtctggaccacgccggagagcgtcgaagcgggggcggtgttcgccgagatcggcccgcgcatggccgagttgagcggttcccggctggccgcgcagcaacagatggaaggcctcctggcgccgcaccggcccaaggagcccgcgtggttcctggccaccgtcggcgtctcgcccgaccaccagggcaagggtctgggcagcgccgtcgtgctccccggagtggaggcggccgagcgcgccggggtgcccgccttcctggagacctccgcgccccgcaacctccccttctacgagcggctcggcttcaccgtcaccgccgacgtcgaggtgcccgaaggaccgcgcacctggtgcatgacccgcaagcccggtgcctga

SEQ ID NO: 22151 - DNA, 2898 bp, Artificial Sequence
  Synthetic Polynucleotide
atggccttaccagtgaccgccttgctcctgccgctggccttgctgctccacgccgccaggccgatgctgcccgctcctaagaatctggtggtgtccagaatcaccgaggacagcgccagactgtcttggacagctcctgatgccgccttcgacagcttccccatccggtacatcgagacactgatctggggcgaagccatctggctggatgtgcctggaagcgagagaagctacgacctgaccggactgaagcctggcacagagtatgccgtggtcatcaccggcgtgaaaggcggcagattctctagccctctggtggcctctttcaccaccggtaccggcggaggcggatctggcggcggaggtagcggtggcggaggatctgaattcagctacgtgctgacacagcctccatccgtgtctgtggctccaggacagaccgccagaatcacatgcggcggcaacaacatcggcggcaagagcgtgcactggtatcagcagccacctggacaggctccagtggtggtggtgtacgacgacagcgatagacctagcggcatccccgagagattcagcggcagcaattccggcaataccgccacactgaccatcagcagagtggaagctggcgacgaggccgtgtactactgccaagtgtgggacagcagcagcgatcacgtggtgtttggcggcggaacaaagctgacagtgcttctcgaggacctgaagaacgtgttcccacctgaggtggccgtgttcgagcctagcgaggccgagatcagccacacccagaaagccaccctcgtgtgcctggctaccggcttctaccccgaccatgtggaactgtcttggtgggtcaacggcaaagaggtgcacagcggcgtgtgtaccgacccccagccactgaaagaacagcccgccctgaacgacagccggtactgcctgagcagcagactgagagtgtccgccaccttctggcagaacccccggaaccacttcagatgccaggtgcagttctacggcctgagcgagaacgacgagtggacccaggacagagccaagcccgtgacccagatcgtgtctgccgaagcctggggcagagccgattgcggctttaccagcgagagctaccagcagggcgtgctgagcgccaccatcctgtacgagatcctgctgggcaaggccaccctgtacgccgtgctggtgtctgccctggtgctgatggctatggtcaagcggaaggacagccggggaagggccaagcgatctggatctggagcaacaaacttctcactactcaaacaagcaggtgacgtggaggagaatcccgggcctactagtatggactggatttggcgcatccttttccttgtcggcgctgctaccggcgcgcattccttcgaacaactccagctgcaagagtctggccctggcctggtcaagcctagcgaaacactgagcctgacctgtaccgtgtctggcggctctatcagctccagcagctatttctggggctggatcagacaacctcctggcaaaggactggaatggatcggctccatctactacagcggcatcacctactacaaccccagcctgaagtccagagtgaccatctccgtggacaccagcaagaaccagttctccctgaagctgagcagcgtgacagccgccgataccgccgtgtattattgtgccagacatgacggcgctgtggccggcctgtttgattattggggacagggcaccctggtcaccgtgtcatctgctacgcgtatccagaaccctgatcctgccgtgtaccagctgcgggatagcaagagcagcgacaagagcgtgtgtctgttcaccgacttcgacagccagaccaacgtgtcccagagcaaggactccgacgtgtacatcaccgataagtgcgtgctggacatgcggagcatggacttcaagagcaactccgccgtggcctggtccaacaagtccgatttcgcctgcgccaacgccttcaacaacagcattatccccgaggacacattcttcccaagccccgagagcagctgcgacgtgaagctggtggaaaagagcttcgagacagacaccaacctgaacttccagaacctgagcgtgatcggcttcagaatcctgctgctgaaagtggccggctttaacctgctgatgaccctgcggctgtggtccagccgcgccaagagaagcggatctggcgtgaagcagaccctgaatttcgacctgctgaagctggctggcgacgtggaatccaacccaggcccttctagaggccatatgaccgagtacaagcccacggtgcgcctcgccacccgcgacgacgtccccagggccgtacgcaccctcgccgccgcgttcgccgactaccccgccacgcgccacaccgtcgatccggaccgccacatcgagcgggtcaccgagctgcaagaactcttcctcacgcgcgtcgggctcgacatcggcaaggtgtgggtcgcggacgacggcgccgcggtggcggtctggaccacgccggagagcgtcgaagcgggggcggtgttcgccgagatcggcccgcgcatggccgagttgagcggttcccggctggccgcgcagcaacagatggaaggcctcctggcgccgcaccggcccaaggagcccgcgtggttcctggccaccgtcggcgtctcgcccgaccaccagggcaagggtctgggcagcgccgtcgtgctccccggagtggaggcggccgagcgcgccggggtgcccgccttcctggagacctccgcgccccgcaacctccccttctacgagcggctcggcttcaccgtcaccgccgacgtcgaggtgcccgaaggaccgcgcacctggtgcatgacccgcaagcccggtgcctga

SEQ ID NO: 22152 - DNA, 2991 bp, Artificial Sequence
  Synthetic Polynucleotide
atggccttaccagtgaccgccttgctcctgccgctggccttgctgctccacgccgccaggccggaggttcagctgcttgagtctggcggaggactggttcaacctggcggaagcctgagactgtcttgtgccgccagcggcttcacctttagcagctacgccatgagctgggtccgacaggctcctggcaaaggactggaatgggtgtccagcatcagcggcagcggcgactacatctactacgccgatagcgtgaagggcagattcaccatcagccgggacatcagcaagaacaccctgtacctccagatgaacagcctgagagccgaggacaccgccgtgtactactgtgccaaagaaggcaccggcgctaacagcagcctggccgattatagaggccagggcacactggtcaccgtgtctagtggtaccggcggaggcggatctggcggcggaggtagcggtggcggaggatctgaattcagctacgtgctgacacagcctccatccgtgtctgtggctccaggacagaccgccagaatcacatgcggcggcaacaacatcggcggcaagagcgtgcactggtatcagcagccacctggacaggctccagtggtggtggtgtacgacgacagcgatagacctagcggcatccccgagagattcagcggcagcaattccggcaataccgccacactgaccatcagcagagtggaagctggcgacgaggccgtgtactactgccaagtgtgggacagcagcagcgatcacgtggtgtttggcggcggaacaaagctgacagtgcttctcgaggacctgaagaacgtgttcccacctgaggtggccgtgttcgagcctagcgaggccgagatcagccacacccagaaagccaccctcgtgtgcctggctaccggcttctaccccgaccatgtggaactgtcttggtgggtcaacggcaaagaggtgcacagcggcgtgtgtaccgacccccagccactgaaagaacagcccgccctgaacgacagccggtactgcctgagcagcagactgagagtgtccgccaccttctggcagaacccccggaaccacttcagatgccaggtgcagttctacggcctgagcgagaacgacgagtggacccaggacagagccaagcccgtgacccagatcgtgtctgccgaagcctggggcagagccgattgcggctttaccagcgagagctaccagcagggcgtgctgagcgccaccatcctgtacgagatcctgctgggcaaggccaccctgtacgccgtgctggtgtctgccctggtgctgatggctatggtcaagcggaaggacagccggggaagggccaagcgatctggatctggagcaacaaacttctcactactcaaacaagcaggtgacgtggaggagaatcccgggcctactagtatggactggatttggcgcatccttttccttgtcggcgctgctaccggcgcgcattccttcgaacaactccagctgcaagagtctggccctggcctggtcaagcctagcgaaacactgagcctgacctgtaccgtgtctggcggctctatcagctccagcagctatttctggggctggatcagacaacctcctggcaaaggactggaatggatcggctccatctactacagcggcatcacctactacaaccccagcctgaagtccagagtgaccatctccgtggacaccagcaagaaccagttctccctgaagctgagcagcgtgacagccgccgataccgccgtgtattattgtgccagacatgacggcgctgtggccggcctgtttgattattggggacagggcaccctggtcaccgtgtcatctgctacgcgtatccagaaccctgatcctgccgtgtaccagctgcgggatagcaagagcagcgacaagagcgtgtgtctgttcaccgacttcgacagccagaccaacgtgtcccagagcaaggactccgacgtgtacatcaccgataagtgcgtgctggacatgcggagcatggacttcaagagcaactccgccgtggcctggtccaacaagtccgatttcgcctgcgccaacgccttcaacaacagcattatccccgaggacacattcttcccaagccccgagagcagctgcgacgtgaagctggtggaaaagagcttcgagacagacaccaacctgaacttccagaacctgagcgtgatcggcttcagaatcctgctgctgaaagtggccggctttaacctgctgatgaccctgcggctgtggtccagccgcgccaagagaagcggatctggcgtgaagcagaccctgaatttcgacctgctgaagctggctggcgacgtggaatccaacccaggcccttctagaggccatatgaccgagtacaagcccacggtgcgcctcgccacccgcgacgacgtccccagggccgtacgcaccctcgccgccgcgttcgccgactaccccgccacgcgccacaccgtcgatccggaccgccacatcgagcgggtcaccgagctgcaagaactcttcctcacgcgcgtcgggctcgacatcggcaaggtgtgggtcgcggacgacggcgccgcggtggcggtctggaccacgccggagagcgtcgaagcgggggcggtgttcgccgagatcggcccgcgcatggccgagttgagcggttcccggctggccgcgcagcaacagatggaaggcctcctggcgccgcaccggcccaaggagcccgcgtggttcctggccaccgtcggcgtctcgcccgaccaccagggcaagggtctgggcagcgccgtcgtgctccccggagtggaggcggccgagcgcgccggggtgcccgccttcctggagacctccgcgccccgcaacctccccttctacgagcggctcggcttcaccgtcaccgccgacgtcgaggtgcccgaaggaccgcgcacctggtgcatgacccgcaagcccggtgcctga

SEQ ID NO: 22153 - DNA, 3486 bp, Artificial Sequence
  Synthetic Polynucleotide
atggccttaccagtgaccgccttgctcctgccgctggccttgctgctccacgccgccaggccggcatgcgaagtgcagctgcttgaaagtggcggcggactgattcagcctggcggatctctgagactgagctgtgccgccagcggcttcaccttttctagccacgccatgacctgggtccgacaggcacctggaaaagggcttgaatgggtgtccgccatcagcggctctggcgattacacacactacgccgacagcgtgaagggcagattcaccatcagcagagacaacagcaagaacaccgtgtacctccagatgaacagcctgagagccgaggacagcgccgtgtattattgcgccaaggatgaggatggcggcagcctgcttggacacagaggacaaggcaccctggtcaccgtttcttccggtaccggcggaggcggatctggcggcggaggtagcggtggcggaggatctgaattcagctacgtgctgacacagcctccatccgtgtctgtggctccaggacagaccgccagaatcacatgcggcggcaacaacatcggcggcaagagcgtgcactggtatcagcagccacctggacaggctccagtggtggtggtgtacgacgacagcgatagacctagcggcatccccgagagattcagcggcagcaattccggcaataccgccacactgaccatcagcagagtggaagctggcgacgaggccgtgtactactgccaagtgtgggacagcagcagcgatcacgtggtgtttggcggcggaacaaagctgacagtgcttctcgagggacagcctaaggccaatcctaccgtgacactgttccctccaagcagcgaagaactccaggccaacaaggccacacttgtgtgcctgatctccgacttctaccctggggctgtgacagtggcttggaaggccgatggatctcctgtgaaagccggcgtggaaaccaccaagccatccaagcagagcaacaacaaatacgccgccagctcctacctgagcctgacacctgagcagtggaagtcccacagatcctacagctgccaagtgacccacgaaggcagcaccgtggaaaagacagtggcccctacagagtgcagccccatcaagaccgatgtgattacaatggaccccaaggacaactgctccaaggacgccaacgataccctgctgctccagctgaccaacaccagcgcctactacatgtacttgttgctgctgctgaagtccgtggtgtacttcgccatcatcacatgctgcctgctgcggagaaccgccttctgctgcaacggcgagaagtctagggccaagcgatctggatctggagcaacaaacttctcactactcaaacaagcaggtgacgtggaggagaatcccgggcctactagtgccaccatggactggatttggcgcatccttttccttgtcggcgctgctaccggcgcccattccgggccccaggttcagctgcaagagtctggcggaggacttgctcaagctggcggaagcctgagactgtcttgtgccgcctctggcagaaccttcagcatgggctggtttagacaggcccctggcaaagagagagagttcgtcgccgccatcacatacagcggcggcagcccttactacgcctcttctgtcagaggccggttcaccatcagccgggacaacgccaagaacaccgtgtacctccagatgaacagcctgaagccagaggacaccgccgtgtactactgtgccgccaatccaacctacggcagcgactggaatgccgagaattggggccagggcacccaagtgacagtgtctagtggatccggcggcggaggatctggcggaggcggatctgggggcggaggctctttcgaacaactccagctgcaagagtctggccctggcctggtcaagcctagcgaaacactgagcctgacctgtaccgtgtctggcggctctatcagctccagcagctatttctggggctggatcagacaacctcctggcaaaggactggaatggatcggctccatctactacagcggcatcacctactacaaccccagcctgaagtccagagtgaccatctccgtggacaccagcaagaaccagttctccctgaagctgagcagcgtgacagccgccgataccgccgtgtattattgtgccagacatgacggcgctgtggccggcctgtttgattattggggacagggcaccctggtcaccgtgtcatctgctacgcgtgcctctacaaagggaccctccgtgtttcctctggctcccagcagcaagtctacaagcggaggaacagccgctctgggctgcctggtcaaggattactttcccgagcctgtgaccgtgtcctggaatagcggagcactgacaagcggcgtgcacacctttccagccgtgctgcaaagcagcggcctgtactctctgagcagcgtggtcacagtgcctagctctagcctgggcacccagacctacatctgcaatgtgaaccacaagcctagcaacaccaaggtggacaagagagtggaacccaagagctgtgaagtgaaaaccgactccaccgaccacgtgaagcccaaagagacagagaacaccaagcagcccagcaagagctgccacaagcccaaggccatcgtgcacaccgagaaagtgaacatgatgagcctgaccgtgctgggcctgcggatgctgttcgccaaaaccgtggccgtgaacttcctgctgaccgccaagctgttcttcctccgcgccaagagaagcggatctggcgtgaagcagaccctgaatttcgacctgctgaagctggctggcgacgtggaatccaacccaggcccttctagaggccatatgaccgagtacaagcccacggtgcgcctcgccacccgcgacgacgtccccagggccgtacgcaccctcgccgccgcgttcgccgactaccccgccacgcgccacaccgtcgatccggaccgccacatcgagcgggtcaccgagctgcaagaactcttcctcacgcgcgtcgggctcgacatcggcaaggtgtgggtcgcggacgacggcgccgcggtggcggtctggaccacgccggagagcgtcgaagcgggggcggtgttcgccgagatcggcccgcgcatggccgagttgagcggttcccggctggccgcgcagcaacagatggaaggcctcctggcgccgcaccggcccaaggagcccgcgtggttcctggccaccgtcggcgtctcgcccgaccaccagggcaagggtctgggcagcgccgtcgtgctccccggagtggaggcggccgagcgcgccggggtgcccgccttcctggagacctccgcgccccgcaacctccccttctacgagcggctcggcttcaccgtcaccgccgacgtcgaggtgcccgaaggaccgcgcacctggtgcatgacccgcaagcccggtgcctga

SEQ ID NO: 22154 - DNA, 3420 bp, Artificial Sequence
  Synthetic Polynucleotide
atggccttaccagtgaccgccttgctcctgccgctggccttgctgctccacgccgccaggccggcatgcgaagtgcagctgcttgaaagtggcggcggactgattcagcctggcggatctctgagactgagctgtgccgccagcggcttcaccttttctagccacgccatgacctgggtccgacaggcacctggaaaagggcttgaatgggtgtccgccatcagcggctctggcgattacacacactacgccgacagcgtgaagggcagattcaccatcagcagagacaacagcaagaacaccgtgtacctccagatgaacagcctgagagccgaggacagcgccgtgtattattgcgccaaggatgaggatggcggcagcctgcttggacacagaggacaaggcaccctggtcaccgtttcttccggtaccggcggaggcggatctggcggcggaggtagcggtggcggaggatctgaattcagctacgtgctgacacagcctccatccgtgtctgtggctccaggacagaccgccagaatcacatgcggcggcaacaacatcggcggcaagagcgtgcactggtatcagcagccacctggacaggctccagtggtggtggtgtacgacgacagcgatagacctagcggcatccccgagagattcagcggcagcaattccggcaataccgccacactgaccatcagcagagtggaagctggcgacgaggccgtgtactactgccaagtgtgggacagcagcagcgatcacgtggtgtttggcggcggaacaaagctgacagtgcttctcgagggacagcctaaggccaatcctaccgtgacactgttccctccaagcagcgaagaactccaggccaacaaggccacacttgtgtgcctgatctccgacttctaccctggggctgtgacagtggcttggaaggccgatggatctcctgtgaaagccggcgtggaaaccaccaagccatccaagcagagcaacaacaaatacgccgccagctcctacctgagcctgacacctgagcagtggaagtcccacagatcctacagctgccaagtgacccacgaaggcagcaccgtggaaaagacagtggcccctacagagtgcagcggcagagccgattgcggctttaccagcgagagctaccagcagggcgtgctgagcgccaccatcctgtacgagatcctgctgggcaaggccaccctgtacgccgtgctggtgtctgccctggtgctgatggctatggtcaagcggaaggacagccggggaagggccaagcgatctggatctggagcaacaaacttctcactactcaaacaagcaggtgacgtggaggagaatcccgggcctactagtgccaccatggactggatttggcgcatccttttccttgtcggcgctgctaccggcgcccattccgggccccaggttcagctgcaagagtctggcggaggacttgctcaagctggcggaagcctgagactgtcttgtgccgcctctggcagaaccttcagcatgggctggtttagacaggcccctggcaaagagagagagttcgtcgccgccatcacatacagcggcggcagcccttactacgcctcttctgtcagaggccggttcaccatcagccgggacaacgccaagaacaccgtgtacctccagatgaacagcctgaagccagaggacaccgccgtgtactactgtgccgccaatccaacctacggcagcgactggaatgccgagaattggggccagggcacccaagtgacagtgtctagtggatccggcggcggaggatctggcggaggcggatctgggggcggaggctctttcgaacaactccagctgcaagagtctggccctggcctggtcaagcctagcgaaacactgagcctgacctgtaccgtgtctggcggctctatcagctccagcagctatttctggggctggatcagacaacctcctggcaaaggactggaatggatcggctccatctactacagcggcatcacctactacaaccccagcctgaagtccagagtgaccatctccgtggacaccagcaagaaccagttctccctgaagctgagcagcgtgacagccgccgataccgccgtgtattattgtgccagacatgacggcgctgtggccggcctgtttgattattggggacagggcaccctggtcaccgtgtcatctgctacgcgtgcctctacaaagggaccctccgtgtttcctctggctcccagcagcaagtctacaagcggaggaacagccgctctgggctgcctggtcaaggattactttcccgagcctgtgaccgtgtcctggaatagcggagcactgacaagcggcgtgcacacctttccagccgtgctgcaaagcagcggcctgtactctctgagcagcgtggtcacagtgcctagctctagcctgggcacccagacctacatctgcaatgtgaaccacaagcctagcaacaccaaggtggacaagagagtggaacccaagagctgtatccccgaggacacattcttcccaagccccgagagcagctgcgacgtgaagctggtggaaaagagcttcgagacagacaccaacctgaacttccagaacctgagcgtgatcggcttcagaatcctgctgctgaaagtggccggctttaacctgctgatgaccctgcggctgtggtccagccgcgccaagagaagcggatctggcgtgaagcagaccctgaatttcgacctgctgaagctggctggcgacgtggaatccaacccaggcccttctagaggccatatgaccgagtacaagcccacggtgcgcctcgccacccgcgacgacgtccccagggccgtacgcaccctcgccgccgcgttcgccgactaccccgccacgcgccacaccgtcgatccggaccgccacatcgagcgggtcaccgagctgcaagaactcttcctcacgcgcgtcgggctcgacatcggcaaggtgtgggtcgcggacgacggcgccgcggtggcggtctggaccacgccggagagcgtcgaagcgggggcggtgttcgccgagatcggcccgcgcatggccgagttgagcggttcccggctggccgcgcagcaacagatggaaggcctcctggcgccgcaccggcccaaggagcccgcgtggttcctggccaccgtcggcgtctcgcccgaccaccagggcaagggtctgggcagcgccgtcgtgctccccggagtggaggcggccgagcgcgccggggtgcccgccttcctggagacctccgcgccccgcaacctccccttctacgagcggctcggcttcaccgtcaccgccgacgtcgaggtgcccgaaggaccgcgcacctggtgcatgacccgcaagcccggtgcctga

SEQ ID NO: 22155 - DNA, 3405 bp, Artificial Sequence
  Synthetic Polynucleotide
atggccttaccagtgaccgccttgctcctgccgctggccttgctgctccacgccgccaggccggcatgcgaagtgcagctgcttgaaagtggcggcggactgattcagcctggcggatctctgagactgagctgtgccgccagcggcttcaccttttctagccacgccatgacctgggtccgacaggcacctggaaaagggcttgaatgggtgtccgccatcagcggctctggcgattacacacactacgccgacagcgtgaagggcagattcaccatcagcagagacaacagcaagaacaccgtgtacctccagatgaacagcctgagagccgaggacagcgccgtgtattattgcgccaaggatgaggatggcggcagcctgcttggacacagaggacaaggcaccctggtcaccgtttcttccggtaccggcggaggcggatctggcggcggaggtagcggtggcggaggatctgaattcagctacgtgctgacacagcctccatccgtgtctgtggctccaggacagaccgccagaatcacatgcggcggcaacaacatcggcggcaagagcgtgcactggtatcagcagccacctggacaggctccagtggtggtggtgtacgacgacagcgatagacctagcggcatccccgagagattcagcggcagcaattccggcaataccgccacactgaccatcagcagagtggaagctggcgacgaggccgtgtactactgccaagtgtgggacagcagcagcgatcacgtggtgtttggcggcggaacaaagctgacagtgcttctcgaggccgacgtgtcccccaagcctaccatcttcctgccctctatcgccgagacaaagctccagaaggccggcacctacctgtgcctgctggaaaagttcttcccagatgtgattaagatccactggcaggaaaagaagtccaacaccatcctgggcagccaggaaggcaacaccatgaagaccaacgacacctacatgaagttcagctggctgaccgtgcccgagaagtccctggacaaagaacacagatgcatcgtgcggcacgaaaacaacaagaacggcgtggaccaggaaatcatcttcccacccatcaagaccgatgtgattacaatggaccccaaggacaactgctccaaggacgccaacgataccctgctgctccagctgaccaacaccagcgcctactacatgtacttgttgctgctgctgaagtccgtggtgtacttcgccatcatcacatgctgcctgctgcggagaaccgccttctgctgcaacggcgagaagtctagggccaagcgatctggatctggagcaacaaacttctcactactcaaacaagcaggtgacgtggaggagaatcccgggcctactagtatggactggatttggcgcatccttttccttgtcggcgctgctaccggcgcgcattccgggccccaggttcagctgcaagagtctggcggaggacttgctcaagctggcggaagcctgagactgtcttgtgccgcctctggcagaaccttcagcatgggctggtttagacaggcccctggcaaagagagagagttcgtcgccgccatcacatacagcggcggcagcccttactacgcctcttctgtcagaggccggttcaccatcagccgggacaacgccaagaacaccgtgtacctccagatgaacagcctgaagccagaggacaccgccgtgtactactgtgccgccaatccaacctacggcagcgactggaatgccgagaattggggccagggcacccaagtgacagtgtctagtggatccggcggcggaggatctggcggaggcggatctgggggcggaggctctttcgaacaactccagctgcaagagtctggccctggcctggtcaagcctagcgaaacactgagcctgacctgtaccgtgtctggcggctctatcagctccagcagctatttctggggctggatcagacaacctcctggcaaaggactggaatggatcggctccatctactacagcggcatcacctactacaaccccagcctgaagtccagagtgaccatctccgtggacaccagcaagaaccagttctccctgaagctgagcagcgtgacagccgccgataccgccgtgtattattgtgccagacatgacggcgctgtggccggcctgtttgattattggggacagggcaccctggtcaccgtgtcatctgctacgcgtcctcacaccaagcccagcgtgttcgtgatgaagaacggcaccaacgtggcctgcctcgtgaaagagttctaccccaaggacatcaggatcaacctggtgtccagcaagaagatcaccgagttcgaccccgccatcgtgatctcccccagcggcaagtacaacgccgtgaagctggggaagtacgaggacagcaacagcgtgacctgctccgtgcagcacgacaacaagaccgtgcacagcaccgactttgaagtgaaaaccgactccaccgaccacgtgaagcccaaagagacagagaacaccaagcagcccagcaagagctgccacaagcccaaggccatcgtgcacaccgagaaagtgaacatgatgagcctgaccgtgctgggcctgcggatgctgttcgccaaaaccgtggccgtgaacttcctgctgaccgccaagctgttcttcctccgcgccaagagaagcggatctggcgtgaagcagaccctgaatttcgacctgctgaagctggctggcgacgtggaatccaacccaggcccttctagaggccatatgaccgagtacaagcccacggtgcgcctcgccacccgcgacgacgtccccagggccgtacgcaccctcgccgccgcgttcgccgactaccccgccacgcgccacaccgtcgatccggaccgccacatcgagcgggtcaccgagctgcaagaactcttcctcacgcgcgtcgggctcgacatcggcaaggtgtgggtcgcggacgacggcgccgcggtggcggtctggaccacgccggagagcgtcgaagcgggggcggtgttcgccgagatcggcccgcgcatggccgagttgagcggttcccggctggccgcgcagcaacagatggaaggcctcctggcgccgcaccggcccaaggagcccgcgtggttcctggccaccgtcggcgtctcgcccgaccaccagggcaagggtctgggcagcgccgtcgtgctccccggagtggaggcggccgagcgcgccggggtgcccgccttcctggagacctccgcgccccgcaacctccccttctacgagcggctcggcttcaccgtcaccgccgacgtcgaggtgcccgaaggaccgcgcacctggtgcatgacccgcaagcccggtgcctga

SEQ ID NO: 22156 - DNA, 2895 bp, Artificial Sequence
  Synthetic Polynucleotide
atggccttaccagtgaccgccttgctcctgccgctggccttgctgctccacgccgccaggccgatgctgcccgctcctaagaatctggtggtgtccagaatcaccgaggacagcgccagactgtcttggacagctcctgatgccgccttcgacagcttccccatccggtacatcgagacactgatctggggcgaagccatctggctggatgtgcctggaagcgagagaagctacgacctgaccggactgaagcctggcacagagtatgccgtggtcatcaccggcgtgaaaggcggcagattctctagccctctggtggcctctttcaccaccggtaccggcggaggcggatctggcggcggaggtagcggtggcggaggatctgaattcgagatcgtgctgacacagagccctgccaccctgtctctgagccctggcgaaagagccaccctgagctgtagagccagccagagcgtgtccagctacctggcctggtatcagcagaagcccggccaggctccccggctgctgatctacgatgccagcaatagagccaccggcatccccgccagattttccggctctggcagcggcaccgacttcaccctgaccatcagctccctggaacccgaggacttcgccgtgtactactgccagcagcggagcaactggcccatcacattcggccagggcacccggctggaaatcaaactcgaggacctgaagaacgtgttcccacctgaggtggccgtgttcgagcctagcgaggccgagatcagccacacccagaaagccaccctcgtgtgcctggctaccggcttctaccccgaccatgtggaactgtcttggtgggtcaacggcaaagaggtgcacagcggcgtgtgtaccgacccccagccactgaaagaacagcccgccctgaacgacagccggtactgcctgagcagcagactgagagtgtccgccaccttctggcagaacccccggaaccacttcagatgccaggtgcagttctacggcctgagcgagaacgacgagtggacccaggacagagccaagcccgtgacccagatcgtgtctgccgaagcctggggcagagccgattgcggctttaccagcgagagctaccagcagggcgtgctgagcgccaccatcctgtacgagatcctgctgggcaaggccaccctgtacgccgtgctggtgtctgccctggtgctgatggctatggtcaagcggaaggacagccggggaagggccaagcgatctggatctggagcaacaaacttctcactactcaaacaagcaggtgacgtggaggagaatcccgggcctactagtatggactggatttggcgcatccttttccttgtcggcgctgctaccggcgcgcattccttcgaagaagtgcagctggtggaatcaggcggcggactggtgcagcctggcagaagcctgagactgagctgtgccgccagcggcttcaccttcaacgactacgccatgcactgggtgcgccaggcccctggaaaaggactggaatgggtgtccacaatcagctggaacagcggcagcatcggctacgccgatagcgtgaagggccggttcaccatcagccgggacaacgccaagaagtccctgtacctccagatgaacagcctgcgggccgaggacacagccctgtactattgcgccaaggacatccagtacggcaactactactacggcatggacgtgtggggccagggaaccaccgtgaccgtgtcatctacgcgtatccagaaccctgatcctgccgtgtaccagctgcgggatagcaagagcagcgacaagagcgtgtgtctgttcaccgacttcgacagccagaccaacgtgtcccagagcaaggactccgacgtgtacatcaccgataagtgcgtgctggacatgcggagcatggacttcaagagcaactccgccgtggcctggtccaacaagtccgatttcgcctgcgccaacgccttcaacaacagcattatccccgaggacacattcttcccaagccccgagagcagctgcgacgtgaagctggtggaaaagagcttcgagacagacaccaacctgaacttccagaacctgagcgtgatcggcttcagaatcctgctgctgaaagtggccggctttaacctgctgatgaccctgcggctgtggtccagccgcgccaagagaagcggatctggcgtgaagcagaccctgaatttcgacctgctgaagctggctggcgacgtggaatccaacccaggcccttctagaggccatatgaccgagtacaagcccacggtgcgcctcgccacccgcgacgacgtccccagggccgtacgcaccctcgccgccgcgttcgccgactaccccgccacgcgccacaccgtcgatccggaccgccacatcgagcgggtcaccgagctgcaagaactcttcctcacgcgcgtcgggctcgacatcggcaaggtgtgggtcgcggacgacggcgccgcggtggcggtctggaccacgccggagagcgtcgaagcgggggcggtgttcgccgagatcggcccgcgcatggccgagttgagcggttcccggctggccgcgcagcaacagatggaaggcctcctggcgccgcaccggcccaaggagcccgcgtggttcctggccaccgtcggcgtctcgcccgaccaccagggcaagggtctgggcagcgccgtcgtgctccccggagtggaggcggccgagcgcgccggggtgcccgccttcctggagacctccgcgccccgcaacctccccttctacgagcggctcggcttcaccgtcaccgccgacgtcgaggtgcccgaaggaccgcgcacctggtgcatgacccgcaagcccggtgcctga

SEQ ID NO: 22157 - DNA, 2988 bp, Artificial Sequence
  Synthetic Polynucleotide
atggccttaccagtgaccgccttgctcctgccgctggccttgctgctccacgccgccaggccggaggttcagctgcttgagtctggcggaggactggttcaacctggcggaagcctgagactgtcttgtgccgccagcggcttcacctttagcagctacgccatgagctgggtccgacaggctcctggcaaaggactggaatgggtgtccagcatcagcggcagcggcgactacatctactacgccgatagcgtgaagggcagattcaccatcagccgggacatcagcaagaacaccctgtacctccagatgaacagcctgagagccgaggacaccgccgtgtactactgtgccaaagaaggcaccggcgctaacagcagcctggccgattatagaggccagggcacactggtcaccgtgtctagtggtaccggcggaggcggatctggcggcggaggtagcggtggcggaggatctgaattcgagatcgtgctgacacagagccctgccaccctgtctctgagccctggcgaaagagccaccctgagctgtagagccagccagagcgtgtccagctacctggcctggtatcagcagaagcccggccaggctccccggctgctgatctacgatgccagcaatagagccaccggcatccccgccagattttccggctctggcagcggcaccgacttcaccctgaccatcagctccctggaacccgaggacttcgccgtgtactactgccagcagcggagcaactggcccatcacattcggccagggcacccggctggaaatcaaactcgaggacctgaagaacgtgttcccacctgaggtggccgtgttcgagcctagcgaggccgagatcagccacacccagaaagccaccctcgtgtgcctggctaccggcttctaccccgaccatgtggaactgtcttggtgggtcaacggcaaagaggtgcacagcggcgtgtgtaccgacccccagccactgaaagaacagcccgccctgaacgacagccggtactgcctgagcagcagactgagagtgtccgccaccttctggcagaacccccggaaccacttcagatgccaggtgcagttctacggcctgagcgagaacgacgagtggacccaggacagagccaagcccgtgacccagatcgtgtctgccgaagcctggggcagagccgattgcggctttaccagcgagagctaccagcagggcgtgctgagcgccaccatcctgtacgagatcctgctgggcaaggccaccctgtacgccgtgctggtgtctgccctggtgctgatggctatggtcaagcggaaggacagccggggaagggccaagcgatctggatctggagcaacaaacttctcactactcaaacaagcaggtgacgtggaggagaatcccgggcctactagtatggactggatttggcgcatccttttccttgtcggcgctgctaccggcgcgcattccttcgaagaagtgcagctggtggaatcaggcggcggactggtgcagcctggcagaagcctgagactgagctgtgccgccagcggcttcaccttcaacgactacgccatgcactgggtgcgccaggcccctggaaaaggactggaatgggtgtccacaatcagctggaacagcggcagcatcggctacgccgatagcgtgaagggccggttcaccatcagccgggacaacgccaagaagtccctgtacctccagatgaacagcctgcgggccgaggacacagccctgtactattgcgccaaggacatccagtacggcaactactactacggcatggacgtgtggggccagggaaccaccgtgaccgtgtcatctacgcgtatccagaaccctgatcctgccgtgtaccagctgcgggatagcaagagcagcgacaagagcgtgtgtctgttcaccgacttcgacagccagaccaacgtgtcccagagcaaggactccgacgtgtacatcaccgataagtgcgtgctggacatgcggagcatggacttcaagagcaactccgccgtggcctggtccaacaagtccgatttcgcctgcgccaacgccttcaacaacagcattatccccgaggacacattcttcccaagccccgagagcagctgcgacgtgaagctggtggaaaagagcttcgagacagacaccaacctgaacttccagaacctgagcgtgatcggcttcagaatcctgctgctgaaagtggccggctttaacctgctgatgaccctgcggctgtggtccagccgcgccaagagaagcggatctggcgtgaagcagaccctgaatttcgacctgctgaagctggctggcgacgtggaatccaacccaggcccttctagaggccatatgaccgagtacaagcccacggtgcgcctcgccacccgcgacgacgtccccagggccgtacgcaccctcgccgccgcgttcgccgactaccccgccacgcgccacaccgtcgatccggaccgccacatcgagcgggtcaccgagctgcaagaactcttcctcacgcgcgtcgggctcgacatcggcaaggtgtgggtcgcggacgacggcgccgcggtggcggtctggaccacgccggagagcgtcgaagcgggggcggtgttcgccgagatcggcccgcgcatggccgagttgagcggttcccggctggccgcgcagcaacagatggaaggcctcctggcgccgcaccggcccaaggagcccgcgtggttcctggccaccgtcggcgtctcgcccgaccaccagggcaagggtctgggcagcgccgtcgtgctccccggagtggaggcggccgagcgcgccggggtgcccgccttcctggagacctccgcgccccgcaacctccccttctacgagcggctcggcttcaccgtcaccgccgacgtcgaggtgcccgaaggaccgcgcacctggtgcatgacccgcaagcccggtgcctga

SEQ ID NO: 22158 - DNA, 3417 bp, Artificial Sequence
  Synthetic Polynucleotide
atggccttaccagtgaccgccttgctcctgccgctggccttgctgctccacgccgccaggccggcatgcgaagtgcagctgcttgaaagtggcggcggactgattcagcctggcggatctctgagactgagctgtgccgccagcggcttcaccttttctagccacgccatgacctgggtccgacaggcacctggaaaagggcttgaatgggtgtccgccatcagcggctctggcgattacacacactacgccgacagcgtgaagggcagattcaccatcagcagagacaacagcaagaacaccgtgtacctccagatgaacagcctgagagccgaggacagcgccgtgtattattgcgccaaggatgaggatggcggcagcctgcttggacacagaggacaaggcaccctggtcaccgtttcttccggtaccggcggaggcggatctggcggcggaggtagcggtggcggaggatctgaattcgagatcgtgctgacacagagccctgccaccctgtctctgagccctggcgaaagagccaccctgagctgtagagccagccagagcgtgtccagctacctggcctggtatcagcagaagcccggccaggctccccggctgctgatctacgatgccagcaatagagccaccggcatccccgccagattttccggctctggcagcggcaccgacttcaccctgaccatcagctccctggaacccgaggacttcgccgtgtactactgccagcagcggagcaactggcccatcacattcggccagggcacccggctggaaatcaaactcgagggacagcctaaggccaatcctaccgtgacactgttccctccaagcagcgaagaactccaggccaacaaggccacacttgtgtgcctgatctccgacttctaccctggggctgtgacagtggcttggaaggccgatggatctcctgtgaaagccggcgtggaaaccaccaagccatccaagcagagcaacaacaaatacgccgccagctcctacctgagcctgacacctgagcagtggaagtcccacagatcctacagctgccaagtgacccacgaaggcagcaccgtggaaaagacagtggcccctacagagtgcagcggcagagccgattgcggctttaccagcgagagctaccagcagggcgtgctgagcgccaccatcctgtacgagatcctgctgggcaaggccaccctgtacgccgtgctggtgtctgccctggtgctgatggctatggtcaagcggaaggacagccggggaagggccaagcgatctggatctggagcaacaaacttctcactactcaaacaagcaggtgacgtggaggagaatcccgggcctactagtgccaccatggactggatttggcgcatccttttccttgtcggcgctgctaccggcgcccattccgggccccaggttcagctgcaagagtctggcggaggacttgctcaagctggcggaagcctgagactgtcttgtgccgcctctggcagaaccttcagcatgggctggtttagacaggcccctggcaaagagagagagttcgtcgccgccatcacatacagcggcggcagcccttactacgcctcttctgtcagaggccggttcaccatcagccgggacaacgccaagaacaccgtgtacctccagatgaacagcctgaagccagaggacaccgccgtgtactactgtgccgccaatccaacctacggcagcgactggaatgccgagaattggggccagggcacccaagtgacagtgtctagtggatccggcggcggaggatctggcggaggcggatctgggggcggaggctctttcgaagaagtgcagctggtggaatcaggcggcggactggtgcagcctggcagaagcctgagactgagctgtgccgccagcggcttcaccttcaacgactacgccatgcactgggtgcgccaggcccctggaaaaggactggaatgggtgtccacaatcagctggaacagcggcagcatcggctacgccgatagcgtgaagggccggttcaccatcagccgggacaacgccaagaagtccctgtacctccagatgaacagcctgcgggccgaggacacagccctgtactattgcgccaaggacatccagtacggcaactactactacggcatggacgtgtggggccagggaaccaccgtgaccgtgtcatctacgcgtgcctctacaaagggaccctccgtgtttcctctggctcccagcagcaagtctacaagcggaggaacagccgctctgggctgcctggtcaaggattactttcccgagcctgtgaccgtgtcctggaatagcggagcactgacaagcggcgtgcacacctttccagccgtgctgcaaagcagcggcctgtactctctgagcagcgtggtcacagtgcctagctctagcctgggcacccagacctacatctgcaatgtgaaccacaagcctagcaacaccaaggtggacaagagagtggaacccaagagctgtatccccgaggacacattcttcccaagccccgagagcagctgcgacgtgaagctggtggaaaagagcttcgagacagacaccaacctgaacttccagaacctgagcgtgatcggcttcagaatcctgctgctgaaagtggccggctttaacctgctgatgaccctgcggctgtggtccagccgcgccaagagaagcggatctggcgtgaagcagaccctgaatttcgacctgctgaagctggctggcgacgtggaatccaacccaggcccttctagaggccatatgaccgagtacaagcccacggtgcgcctcgccacccgcgacgacgtccccagggccgtacgcaccctcgccgccgcgttcgccgactaccccgccacgcgccacaccgtcgatccggaccgccacatcgagcgggtcaccgagctgcaagaactcttcctcacgcgcgtcgggctcgacatcggcaaggtgtgggtcgcggacgacggcgccgcggtggcggtctggaccacgccggagagcgtcgaagcgggggcggtgttcgccgagatcggcccgcgcatggccgagttgagcggttcccggctggccgcgcagcaacagatggaaggcctcctggcgccgcaccggcccaaggagcccgcgtggttcctggccaccgtcggcgtctcgcccgaccaccagggcaagggtctgggcagcgccgtcgtgctccccggagtggaggcggccgagcgcgccggggtgcccgccttcctggagacctccgcgccccgcaacctccccttctacgagcggctcggcttcaccgtcaccgccgacgtcgaggtgcccgaaggaccgcgcacctggtgcatgacccgcaagcccggtgcctga

SEQ ID NO: 22159 - DNA, 3402 bp, Artificial Sequence
  Synthetic Polynucleotide
atggccttaccagtgaccgccttgctcctgccgctggccttgctgctccacgccgccaggccggcatgcgaagtgcagctgcttgaaagtggcggcggactgattcagcctggcggatctctgagactgagctgtgccgccagcggcttcaccttttctagccacgccatgacctgggtccgacaggcacctggaaaagggcttgaatgggtgtccgccatcagcggctctggcgattacacacactacgccgacagcgtgaagggcagattcaccatcagcagagacaacagcaagaacaccgtgtacctccagatgaacagcctgagagccgaggacagcgccgtgtattattgcgccaaggatgaggatggcggcagcctgcttggacacagaggacaaggcaccctggtcaccgtttcttccggtaccggcggaggcggatctggcggcggaggtagcggtggcggaggatctgaattcgagatcgtgctgacacagagccctgccaccctgtctctgagccctggcgaaagagccaccctgagctgtagagccagccagagcgtgtccagctacctggcctggtatcagcagaagcccggccaggctccccggctgctgatctacgatgccagcaatagagccaccggcatccccgccagattttccggctctggcagcggcaccgacttcaccctgaccatcagctccctggaacccgaggacttcgccgtgtactactgccagcagcggagcaactggcccatcacattcggccagggcacccggctggaaatcaaactcgaggccgacgtgtcccccaagcctaccatcttcctgccctctatcgccgagacaaagctccagaaggccggcacctacctgtgcctgctggaaaagttcttcccagatgtgattaagatccactggcaggaaaagaagtccaacaccatcctgggcagccaggaaggcaacaccatgaagaccaacgacacctacatgaagttcagctggctgaccgtgcccgagaagtccctggacaaagaacacagatgcatcgtgcggcacgaaaacaacaagaacggcgtggaccaggaaatcatcttcccacccatcaagaccgatgtgattacaatggaccccaaggacaactgctccaaggacgccaacgataccctgctgctccagctgaccaacaccagcgcctactacatgtacttgttgctgctgctgaagtccgtggtgtacttcgccatcatcacatgctgcctgctgcggagaaccgccttctgctgcaacggcgagaagtctagggccaagcgatctggatctggagcaacaaacttctcactactcaaacaagcaggtgacgtggaggagaatcccgggcctactagtatggactggatttggcgcatccttttccttgtcggcgctgctaccggcgcgcattccgggccccaggttcagctgcaagagtctggcggaggacttgctcaagctggcggaagcctgagactgtcttgtgccgcctctggcagaaccttcagcatgggctggtttagacaggcccctggcaaagagagagagttcgtcgccgccatcacatacagcggcggcagcccttactacgcctcttctgtcagaggccggttcaccatcagccgggacaacgccaagaacaccgtgtacctccagatgaacagcctgaagccagaggacaccgccgtgtactactgtgccgccaatccaacctacggcagcgactggaatgccgagaattggggccagggcacccaagtgacagtgtctagtggatccggcggcggaggatctggcggaggcggatctgggggcggaggctctttcgaagaagtgcagctggtggaatcaggcggcggactggtgcagcctggcagaagcctgagactgagctgtgccgccagcggcttcaccttcaacgactacgccatgcactgggtgcgccaggcccctggaaaaggactggaatgggtgtccacaatcagctggaacagcggcagcatcggctacgccgatagcgtgaagggccggttcaccatcagccgggacaacgccaagaagtccctgtacctccagatgaacagcctgcgggccgaggacacagccctgtactattgcgccaaggacatccagtacggcaactactactacggcatggacgtgtggggccagggaaccaccgtgaccgtgtcatctacgcgtcctcacaccaagcccagcgtgttcgtgatgaagaacggcaccaacgtggcctgcctcgtgaaagagttctaccccaaggacatcaggatcaacctggtgtccagcaagaagatcaccgagttcgaccccgccatcgtgatctcccccagcggcaagtacaacgccgtgaagctggggaagtacgaggacagcaacagcgtgacctgctccgtgcagcacgacaacaagaccgtgcacagcaccgactttgaagtgaaaaccgactccaccgaccacgtgaagcccaaagagacagagaacaccaagcagcccagcaagagctgccacaagcccaaggccatcgtgcacaccgagaaagtgaacatgatgagcctgaccgtgctgggcctgcggatgctgttcgccaaaaccgtggccgtgaacttcctgctgaccgccaagctgttcttcctccgcgccaagagaagcggatctggcgtgaagcagaccctgaatttcgacctgctgaagctggctggcgacgtggaatccaacccaggcccttctagaggccatatgaccgagtacaagcccacggtgcgcctcgccacccgcgacgacgtccccagggccgtacgcaccctcgccgccgcgttcgccgactaccccgccacgcgccacaccgtcgatccggaccgccacatcgagcgggtcaccgagctgcaagaactcttcctcacgcgcgtcgggctcgacatcggcaaggtgtgggtcgcggacgacggcgccgcggtggcggtctggaccacgccggagagcgtcgaagcgggggcggtgttcgccgagatcggcccgcgcatggccgagttgagcggttcccggctggccgcgcagcaacagatggaaggcctcctggcgccgcaccggcccaaggagcccgcgtggttcctggccaccgtcggcgtctcgcccgaccaccagggcaagggtctgggcagcgccgtcgtgctccccggagtggaggcggccgagcgcgccggggtgcccgccttcctggagacctccgcgccccgcaacctccccttctacgagcggctcggcttcaccgtcaccgccgacgtcgaggtgcccgaaggaccgcgcacctggtgcatgacccgcaagcccggtgcctga

SEQ ID NO: 22160 - DNA, 3402 bp, Artificial Sequence
  Synthetic Polynucleotide
atggccttaccagtgaccgccttgctcctgccgctggccttgctgctccacgccgccaggccggcatgcgaagtgcagctgcttgaaagtggcggcggactgattcagcctggcggatctctgagactgagctgtgccgccagcggcttcaccttttctagccacgccatgacctgggtccgacaggcacctggaaaagggcttgaatgggtgtccgccatcagcggctctggcgattacacacactacgccgacagcgtgaagggcagattcaccatcagcagagacaacagcaagaacaccgtgtacctccagatgaacagcctgagagccgaggacagcgccgtgtattattgcgccaaggatgaggatggcggcagcctgcttggacacagaggacaaggcaccctggtcaccgtttcttccggtaccggcggaggcggatctggcggcggaggtagcggtggcggaggatctgaattcgacatccagatgacccagagccccagcagcctgtctgccagcgtgggcgacagagtgaccatcacatgcaaggccagccaggacgtgggaatcgccgtggcctggtatcagcagaaacccggcaaggtgcccaagctgctgatctactgggccagcaccagacacaccggcgtgcccgatagattttccggcagcggctccggcaccgacttcaccctgacaatcagctccctccagcccgaggacgtggcaacctactactgccagcagtacagcagctacccctacaccttcggccagggcaccaaggtggaaatcaagagactcgaggccgacgtgtcccccaagcctaccatcttcctgccctctatcgccgagacaaagctccagaaggccggcacctacctgtgcctgctggaaaagttcttcccagatgtgattaagatccactggcaggaaaagaagtccaacaccatcctgggcagccaggaaggcaacaccatgaagaccaacgacacctacatgaagttcagctggctgaccgtgcccgagaagtccctggacaaagaacacagatgcatcgtgcggcacgaaaacaacaagaacggcgtggaccaggaaatcatcttcccacccatcaagaccgatgtgattacaatggaccccaaggacaactgctccaaggacgccaacgataccctgctgctccagctgaccaacaccagcgcctactacatgtacttgttgctgctgctgaagtccgtggtgtacttcgccatcatcacatgctgcctgctgcggagaaccgccttctgctgcaacggcgagaagtctagggccaagcgatctggatctggagcaacaaacttctcactactcaaacaagcaggtgacgtggaggagaatcccgggcctactagtatggactggatttggcgcatccttttccttgtcggcgctgctaccggcgcgcattccgggccccaggttcagctgcaagagtctggcggaggacttgctcaagctggcggaagcctgagactgtcttgtgccgcctctggcagaaccttcagcatgggctggtttagacaggcccctggcaaagagagagagttcgtcgccgccatcacatacagcggcggcagcccttactacgcctcttctgtcagaggccggttcaccatcagccgggacaacgccaagaacaccgtgtacctccagatgaacagcctgaagccagaggacaccgccgtgtactactgtgccgccaatccaacctacggcagcgactggaatgccgagaattggggccagggcacccaagtgacagtgtctagtggatccggcggcggaggatctggcggaggcggatctgggggcggaggctctttcgaacaagttcagcttcaacagcctggcgctgagctggtcaaacctggcgcttctgtgaagatgagctgcaaagccagcggctacgccttcagcagctactggatcaactggatgaagcagaaacccggccagggactcgaatggatcggccaaatctatcccggcgacggcgacaccaactacaacggcaagttcaagggcagagccacactgaccgccgatacctctagcagcacagcctacatgcagctgagcagcctgaccagcgaagatagcgccgtgtacttctgtgcccggtccatcacaacagtcgtgggctgcgctatggactattggggccagggaacaagcgtgaccgtgtctagtacgcgtcctcacaccaagcccagcgtgttcgtgatgaagaacggcaccaacgtggcctgcctcgtgaaagagttctaccccaaggacatcaggatcaacctggtgtccagcaagaagatcaccgagttcgaccccgccatcgtgatctcccccagcggcaagtacaacgccgtgaagctggggaagtacgaggacagcaacagcgtgacctgctccgtgcagcacgacaacaagaccgtgcacagcaccgactttgaagtgaaaaccgactccaccgaccacgtgaagcccaaagagacagagaacaccaagcagcccagcaagagctgccacaagcccaaggccatcgtgcacaccgagaaagtgaacatgatgagcctgaccgtgctgggcctgcggatgctgttcgccaaaaccgtggccgtgaacttcctgctgaccgccaagctgttcttcctccgcgccaagagaagcggatctggcgtgaagcagaccctgaatttcgacctgctgaagctggctggcgacgtggaatccaacccaggcccttctagaggccatatgaccgagtacaagcccacggtgcgcctcgccacccgcgacgacgtccccagggccgtacgcaccctcgccgccgcgttcgccgactaccccgccacgcgccacaccgtcgatccggaccgccacatcgagcgggtcaccgagctgcaagaactcttcctcacgcgcgtcgggctcgacatcggcaaggtgtgggtcgcggacgacggcgccgcggtggcggtctggaccacgccggagagcgtcgaagcgggggcggtgttcgccgagatcggcccgcgcatggccgagttgagcggttcccggctggccgcgcagcaacagatggaaggcctcctggcgccgcaccggcccaaggagcccgcgtggttcctggccaccgtcggcgtctcgcccgaccaccagggcaagggtctgggcagcgccgtcgtgctccccggagtggaggcggccgagcgcgccggggtgcccgccttcctggagacctccgcgccccgcaacctccccttctacgagcggctcggcttcaccgtcaccgccgacgtcgaggtgcccgaaggaccgcgcacctggtgcatgacccgcaagcccggtgcctga

SEQ ID NO: 22161 - DNA, 3405 bp, Artificial Sequence; identical to SEQ ID NO: 22135
  Synthetic Polynucleotide

SEQ ID NO: 22162 - DNA, 2988 bp, Artificial Sequence
  Synthetic Polynucleotide
atggccttaccagtgaccgccttgctcctgccgctggccttgctgctccacgccgccaggccggacatccagatgacacagagccctagcagcctgtctgccagcgtgggagacagagtgaccatcacatgcaaggccagcgaccacatcaacaactggctggcctggtatcagcagaagcctggacaggcccctaagctgctgatctacggcgctaccacactggaaacaggcgtgcccagcagattttctggcagcggctctggcaccgactacaccctgacaatatccagcctccagcctgaggacttcgccacctactactgtcagcagagctggaacaccccttggacattcggccagggcaccaagctggaaatcaagagactcgaggacctgaagaacgtgttcccacctgaggtggccgtgttcgagcctagcgaggccgagatcagccacacccagaaagccaccctcgtgtgcctggctaccggcttctaccccgaccatgtggaactgtcttggtgggtcaacggcaaagaggtgcacagcggcgtgtgtaccgacccccagccactgaaagaacagcccgccctgaacgacagccggtactgcctgagcagcagactgagagtgtccgccaccttctggcagaacccccggaaccacttcagatgccaggtgcagttctacggcctgagcgagaacgacgagtggacccaggacagagccaagcccgtgacccagatcgtgtctgccgaagcctggggcagagccgattgcggctttaccagcgagagctaccagcagggcgtgctgagcgccaccatcctgtacgagatcctgctgggcaaggccaccctgtacgccgtgctggtgtctgccctggtgctgatggctatggtcaagcggaaggacagccggggaagggccaagcgatctggatctggagcaacaaacttctcactactcaaacaagcaggtgacgtggaggagaatcccgggcctactagtgccaccatggactggatttggcgcatccttttccttgtcggcgctgctaccggcgcccattccgggcccgaggttcagctgcttgagtctggcggaggactggttcaacctggcggaagcctgagactgtcttgtgccgcctctggctctatcgccagcatccatgctatgggctggttcagacaggcccctggcaaagaacgggaatttgtggccgtgattacttggagcggcggcatcacctactacgccgattctgtgaagggcagattcaccatcagccgggacaacagcaagaacaccgtgtacctccagatgaacagcctgcggcctgaggacacagccctgtattattgtgccggcgacaaacatcagtcctcttggtacgactactggggccagggcacactggtcacagtctcttctggatccggcggcggaggatctggcggaggcggatctgggggcggaggctctttcgaacaagttcagcttcaacagcctggcgctgagctggtcaaacctggcgcttctgtgaagatgagctgcaaagccagcggctacgccttcagcagctactggatcaactggatgaagcagaaacccggccagggactcgaatggatcggccaaatctatcccggcgacggcgacaccaactacaacggcaagttcaagggcagagccacactgaccgccgatacctctagcagcacagcctacatgcagctgagcagcctgaccagcgaagatagcgccgtgtacttctgtgcccggtccatcacaacagtcgtgggctgcgctatggactattggggccagggaacaagcgtgaccgtgtctagtacgcgtatccagaaccctgatcctgccgtgtaccagctgcgggatagcaagagcagcgacaagagcgtgtgtctgttcaccgacttcgacagccagaccaacgtgtcccagagcaaggactccgacgtgtacatcaccgataagtgcgtgctggacatgcggagcatggacttcaagagcaactccgccgtggcctggtccaacaagtccgatttcgcctgcgccaacgccttcaacaacagcattatccccgaggacacattcttcccaagccccgagagcagctgcgacgtgaagctggtggaaaagagcttcgagacagacaccaacctgaacttccagaacctgagcgtgatcggcttcagaatcctgctgctgaaagtggccggctttaacctgctgatgaccctgcggctgtggtccagccgcgccaagagaagcggatctggcgtgaagcagaccctgaatttcgacctgctgaagctggctggcgacgtggaatccaacccaggcccttctagaggccatatgaccgagtacaagcccacggtgcgcctcgccacccgcgacgacgtccccagggccgtacgcaccctcgccgccgcgttcgccgactaccccgccacgcgccacaccgtcgatccggaccgccacatcgagcgggtcaccgagctgcaagaactcttcctcacgcgcgtcgggctcgacatcggcaaggtgtgggtcgcggacgacggcgccgcggtggcggtctggaccacgccggagagcgtcgaagcgggggcggtgttcgccgagatcggcccgcgcatggccgagttgagcggttcccggctggccgcgcagcaacagatggaaggcctcctggcgccgcaccggcccaaggagcccgcgtggttcctggccaccgtcggcgtctcgcccgaccaccagggcaagggtctgggcagcgccgtcgtgctccccggagtggaggcggccgagcgcgccggggtgcccgccttcctggagacctccgcgccccgcaacctccccttctacgagcggctcggcttcaccgtcaccgccgacgtcgaggtgcccgaaggaccgcgcacctggtgcatgacccgcaagcccggtgcctga

SEQ ID NO: 22163 - DNA, 3441 bp, Artificial Sequence
  Synthetic Polynucleotide
atggccttaccagtgaccgccttgctcctgccgctggccttgctgctccacgccgccaggccggcatgcgaggtgcagctcgtggaatcaggcggaggtcttgtacagccaggaaattctcttcggctgtcttgcgccgcgagcgggttcaccttcagcagcttcggaatgagctgggtaagacaggcaccggggaaaggcctggagtgggtgagctcaatcagtgggagcgggtcagataccctgtacgcggattccgtgaagggcagattcacaatctctcgggacaatgctaagacaacactttaccttcagatgaactctctgcgacccgaggataccgctgtctactactgtacaataggaggttctctgtccagaagttctcaagggacactggtgaccgtctccagcggtaccggcgcgatagggttcctccgaacagcgggagccctgcgaagattgttgggactctttggtggcagggctgcccgagtccttggtcttgagacagaattcgacatccagatgacacagagccctagcagcctgtctgccagcgtgggagacagagtgaccatcacatgcaaggccagcgaccacatcaacaactggctggcctggtatcagcagaagcctggacaggcccctaagctgctgatctacggcgctaccacactggaaacaggcgtgcccagcagattttctggcagcggctctggcaccgactacaccctgacaatatccagcctccagcctgaggacttcgccacctactactgtcagcagagctggaacaccccttggacattcggccagggcaccaagctggaaatcaagagactcgaggacctgaagaacgtgttcccacctgaggtggccgtgttcgagcctagcgaggccgagatcagccacacccagaaagccaccctcgtgtgcctggctaccggcttctaccccgaccatgtggaactgtcttggtgggtcaacggcaaagaggtgcacagcggcgtgtgtaccgacccccagccactgaaagaacagcccgccctgaacgacagccggtactgcctgagcagcagactgagagtgtccgccaccttctggcagaacccccggaaccacttcagatgccaggtgcagttctacggcctgagcgagaacgacgagtggacccaggacagagccaagcccgtgacccagatcgtgtctgccgaagcctggggcagagccgattgcggctttaccagcgagagctaccagcagggcgtgctgagcgccaccatcctgtacgagatcctgctgggcaaggccaccctgtacgccgtgctggtgtctgccctggtgctgatggctatggtcaagcggaaggacagccggggaagggccaagcgatctggatctggagcaacaaacttctcactactcaaacaagcaggtgacgtggaggagaatcccgggcctactagtgccaccatggactggatttggcgcatccttttccttgtcggcgctgctaccggcgcccattccgggcccgaagtgcagctggttgaatctggcggaggactggttcaggctggcggatctctgagactgtcttgtgccgccagcggcagaacctttagcatgggctggtttagacaggcccctggcaaagagagagagttcgtcgccgccatcacatactctggcggcagcccttactacgccgactctgtgaagggcagattcaccatcagccgggacaacgccaagaacaccgtgtacctccagatgaacagcctgaagcctgaggacaccgccgtgtactactgcgccgccaatccaacatacggcagcgactggaacgccgagaattggggccagggaacccaagtgacagtgtctagcggatccggcggcggaggatctggcggaggcggatctgggggcggaggctctttcgaacaagttcagcttcaacagcctggcgctgagctggtcaaacctggcgcttctgtgaagatgagctgcaaagccagcggctacgccttcagcagctactggatcaactggatgaagcagaaacccggccagggactcgaatggatcggccaaatctatcccggcgacggcgacaccaactacaacggcaagttcaagggcagagccacactgaccgccgatacctctagcagcacagcctacatgcagctgagcagcctgaccagcgaagatagcgccgtgtacttctgtgcccggtccatcacaacagtcgtgggctgcgctatggactattggggccagggaacaagcgtgaccgtgtctagtacgcgtatccagaaccctgatcctgccgtgtaccagctgcgggatagcaagagcagcgacaagagcgtgtgtctgttcaccgacttcgacagccagaccaacgtgtcccagagcaaggactccgacgtgtacatcaccgataagtgcgtgctggacatgcggagcatggacttcaagagcaactccgccgtggcctggtccaacaagtccgatttcgcctgcgccaacgccttcaacaacagcattatccccgaggacacattcttcccaagccccgagagcagctgcgacgtgaagctggtggaaaagagcttcgagacagacaccaacctgaacttccagaacctgagcgtgatcggcttcagaatcctgctgctgaaagtggccggctttaacctgctgatgaccctgcggctgtggtccagccgcgccaagagaagcggatctggcgtgaagcagaccctgaatttcgacctgctgaagctggctggcgacgtggaatccaacccaggcccttctagaggccatatgaccgagtacaagcccacggtgcgcctcgccacccgcgacgacgtccccagggccgtacgcaccctcgccgccgcgttcgccgactaccccgccacgcgccacaccgtcgatccggaccgccacatcgagcgggtcaccgagctgcaagaactcttcctcacgcgcgtcgggctcgacatcggcaaggtgtgggtcgcggacgacggcgccgcggtggcggtctggaccacgccggagagcgtcgaagcgggggcggtgttcgccgagatcggcccgcgcatggccgagttgagcggttcccggctggccgcgcagcaacagatggaaggcctcctggcgccgcaccggcccaaggagcccgcgtggttcctggccaccgtcggcgtctcgcccgaccaccagggcaagggtctgggcagcgccgtcgtgctccccggagtggaggcggccgagcgcgccggggtgcccgccttcctggagacctccgcgccccgcaacctccccttctacgagcggctcggcttcaccgtcaccgccgacgtcgaggtgcccgaaggaccgcgcacctggtgcatgacccgcaagcccggtgcctga

SEQ ID NO: 22164 - DNA, 2976 bp, Artificial Sequence
  Synthetic Polynucleotide
atggccttaccagtgaccgccttgctcctgccgctggccttgctgctccacgccgccaggccggacatccagatgacacagagccctagcagcctgtctgccagcgtgggagacagagtgaccatcacatgcaaggccagcgaccacatcaacaactggctggcctggtatcagcagaagcctggacaggcccctaagctgctgatctacggcgctaccacactggaaacaggcgtgcccagcagattttctggcagcggctctggcaccgactacaccctgacaatatccagcctccagcctgaggacttcgccacctactactgtcagcagagctggaacaccccttggacattcggccagggcaccaagctggaaatcaagagactcgaggacctgaagaacgtgttcccacctgaggtggccgtgttcgagcctagcgaggccgagatcagccacacccagaaagccaccctcgtgtgcctggctaccggcttctaccccgaccatgtggaactgtcttggtgggtcaacggcaaagaggtgcacagcggcgtgtgtaccgacccccagccactgaaagaacagcccgccctgaacgacagccggtactgcctgagcagcagactgagagtgtccgccaccttctggcagaacccccggaaccacttcagatgccaggtgcagttctacggcctgagcgagaacgacgagtggacccaggacagagccaagcccgtgacccagatcgtgtctgccgaagcctggggcagagccgattgcggctttaccagcgagagctaccagcagggcgtgctgagcgccaccatcctgtacgagatcctgctgggcaaggccaccctgtacgccgtgctggtgtctgccctggtgctgatggctatggtcaagcggaaggacagccggggaagggccaagcgatctggatctggagcaacaaacttctcactactcaaacaagcaggtgacgtggaggagaatcccgggcctactagtgccaccatggactggatttggcgcatccttttccttgtcggcgctgctaccggcgcccattccgggcccgaggtgcagctggttgaatctggcggaggactggttcaggctggcggatctctgagactgtcttgtgccgccagcggctctgtgttcagcggcaatgtgatgggctggtacagacaggcccctggcaaagaaagagagtgggttgccgccattgccagcggcggcagcatctactacagagactctgtgaagggcagattcaccatcagccgggacaacgccaagaacaccgtgtacctccagatgaacagcctgaagcctgaggacaccgccgtgtactactgcaactctcaccctcctacactgccctattggggcctgggaacccaagtgacagtgtcctctggatccggcggcggaggatctggcggaggcggatctgggggcggaggctctttcgaacaagttcagcttcaacagcctggcgctgagctggtcaaacctggcgcttctgtgaagatgagctgcaaagccagcggctacgccttcagcagctactggatcaactggatgaagcagaaacccggccagggactcgaatggatcggccaaatctatcccggcgacggcgacaccaactacaacggcaagttcaagggcagagccacactgaccgccgatacctctagcagcacagcctacatgcagctgagcagcctgaccagcgaagatagcgccgtgtacttctgtgcccggtccatcacaacagtcgtgggctgcgctatggactattggggccagggaacaagcgtgaccgtgtctagtacgcgtatccagaaccctgatcctgccgtgtaccagctgcgggatagcaagagcagcgacaagagcgtgtgtctgttcaccgacttcgacagccagaccaacgtgtcccagagcaaggactccgacgtgtacatcaccgataagtgcgtgctggacatgcggagcatggacttcaagagcaactccgccgtggcctggtccaacaagtccgatttcgcctgcgccaacgccttcaacaacagcattatccccgaggacacattcttcccaagccccgagagcagctgcgacgtgaagctggtggaaaagagcttcgagacagacaccaacctgaacttccagaacctgagcgtgatcggcttcagaatcctgctgctgaaagtggccggctttaacctgctgatgaccctgcggctgtggtccagccgcgccaagagaagcggatctggcgtgaagcagaccctgaatttcgacctgctgaagctggctggcgacgtggaatccaacccaggcccttctagaggccatatgaccgagtacaagcccacggtgcgcctcgccacccgcgacgacgtccccagggccgtacgcaccctcgccgccgcgttcgccgactaccccgccacgcgccacaccgtcgatccggaccgccacatcgagcgggtcaccgagctgcaagaactcttcctcacgcgcgtcgggctcgacatcggcaaggtgtgggtcgcggacgacggcgccgcggtggcggtctggaccacgccggagagcgtcgaagcgggggcggtgttcgccgagatcggcccgcgcatggccgagttgagcggttcccggctggccgcgcagcaacagatggaaggcctcctggcgccgcaccggcccaaggagcccgcgtggttcctggccaccgtcggcgtctcgcccgaccaccagggcaagggtctgggcagcgccgtcgtgctccccggagtggaggcggccgagcgcgccggggtgcccgccttcctggagacctccgcgccccgcaacctccccttctacgagcggctcggcttcaccgtcaccgccgacgtcgaggtgcccgaaggaccgcgcacctggtgcatgacccgcaagcccggtgcctga

SEQ ID NO: 22165 - DNA, 3405 bp, Artificial Sequence; identical to SEQ ID NO: 22135
  Synthetic Polynucleotide

SEQ ID NO: 22166 - DNA, 3405 bp, Artificial Sequence
  Synthetic Polynucleotide
atggccttaccagtgaccgccttgctcctgccgctggccttgctgctccacgccgccaggccggaagttcagctgcaagagtctggcggaggactggttcaacctggcggaagcctgagactgtcttgtgccgcctctggcagaaccttcagcagcctgttcatgggctggttcagacaggcccctggcaaagagagagaactggtcgccgccatcagccggtacagcctgtacacctactacgccgacagcgtgaagggcagattcaccatcagcgccgacaacgccaagaacgccgtgtacctccagatgaacagcctgaagccagaggacacagccgtgtactactgcgccagcaaacttgagtacaccagcaacgactacgacagctggggccagggaacccaagtgacagtctcttctggtaccggcggaggcggatctggcggcggaggtagcggtggcggaggatctgaattcgacatccagatgacacagagccctagcagcctgtctgccagcgtgggagacagagtgaccatcacatgcaaggccagcgaccacatcaacaactggctggcctggtatcagcagaagcctggacaggcccctaagctgctgatctacggcgctaccacactggaaacaggcgtgcccagcagattttctggcagcggctctggcaccgactacaccctgacaatatccagcctccagcctgaggacttcgccacctactactgtcagcagagctggaacaccccttggacattcggccagggcaccaagctggaaatcaagagactcgagatccagaaccctgatcctgccgtgtaccagctgcgggatagcaagagcagcgacaagagcgtgtgtctgttcaccgacttcgacagccagaccaacgtgtcccagagcaaggactccgacgtgtacatcaccgataagtgcgtgctggacatgcggagcatggacttcaagagcaactccgccgtggcctggtccaacaagtccgatttcgcctgcgccaacgccttcaacaacagcattatccccgaggacacattcttcccaagcagcgacgtgccctgcgacgtgaagctggtggaaaagagcttcgagacagacaccaacctgaacttccagaacctgagcgtgatcggcttcagaatcctgctgctgaaagtggccggctttaacctgctgatgaccctgcggctgtggtccagccgcgccaagagaagcggatctggcgtgaagcagaccctgaatttcgacctgctgaagctggctggcgacgtggaatccaacccaggccctactagtgccaccatggactggatttggcgcatccttttccttgtcggcgctgctaccggcgcccattccgggccccaggttcagctgcaagagtctggcggaggacttgctcaagctggcggaagcctgagactgtcttgtgccgcctctggcagaaccttcagcatgggctggtttagacaggcccctggcaaagagagagagttcgtcgccgccatcacatacagcggcggcagcccttactacgcctcttctgtcagaggccggttcaccatcagccgggacaacgccaagaacaccgtgtacctccagatgaacagcctgaagccagaggacaccgccgtgtactactgtgccgccaatccaacctacggcagcgactggaatgccgagaattggggccagggcacccaagtgacagtgtctagtggatccggcggcggaggatctggcggaggcggatctgggggcggaggctctttcgaacaagttcagcttcaacagcctggcgctgagctggtcaaacctggcgcttctgtgaagatgagctgcaaagccagcggctacgccttcagcagctactggatcaactggatgaagcagaaacccggccagggactcgaatggatcggccaaatctatcccggcgacggcgacaccaactacaacggcaagttcaagggcagagccacactgaccgccgatacctctagcagcacagcctacatgcagctgagcagcctgaccagcgaagatagcgccgtgtacttctgtgcccggtccatcacaacagtcgtgggctgcgctatggactattggggccagggaacaagcgtgaccgtgtctagtacgcgtgaggacctgaagaacgtgttcccacctgaggtggccgtgttcgagcctagcaaggccgagatcgcccacacccagaaagccaccctcgtgtgcctggctaccggcttctaccccgaccatgtggaactgtcttggtgggtcaacggcaaagaggtgcacagcggcgtgtgtaccgacccccagccactgaaagaacagcccgccctgaacgacagccggtactgcctgagcagcagactgagagtgtccgccaccttctggcagaacccccggaaccacttcagatgccaggtgcagttctacggcctgagcgagaacgacgagtggacccaggacagagccaagcccgtgacccagatcgtgtctgccgaagcctggggcagagccgattgcggcatcaccagcgccagctaccaccagggcgtgctgagcgccaccatcctgtacgagatcctgctgggcaaggccaccctgtacgccgtgctggtgtctgccctggtgctgatggctatggtcaagcggaaggacagccggggaagggccaagcgatctggatctggagcaacaaacttctcactactcaaacaagcaggtgacgtggaggagaatcccgggccttctagaggccatatgaccgagtacaagcccacggtgcgcctcgccacccgcgacgacgtccccagggccgtacgcaccctcgccgccgcgttcgccgactaccccgccacgcgccacaccgtcgatccggaccgccacatcgagcgggtcaccgagctgcaagaactcttcctcacgcgcgtcgggctcgacatcggcaaggtgtgggtcgcggacgacggcgccgcggtggcggtctggaccacgccggagagcgtcgaagcgggggcggtgttcgccgagatcggcccgcgcatggccgagttgagcggttcccggctggccgcgcagcaacagatggaaggcctcctggcgccgcaccggcccaaggagcccgcgtggttcctggccaccgtcggcgtctcgcccgaccaccagggcaagggtctgggcagcgccgtcgtgctccccggagtggaggcggccgagcgcgccggggtgcccgccttcctggagacctccgcgccccgcaacctccccttctacgagcggctcggcttcaccgtcaccgccgacgtcgaggtgcccgaaggaccgcgcacctggtgcatgacccgcaagcccggtgcctga

SEQ ID NO: 22167 - DNA, 3405 bp, Artificial Sequence
  Synthetic Polynucleotide
atggccttaccagtgaccgccttgctcctgccgctggccttgctgctccacgccgccaggccggaagttcagctgcaagagtctggcggaggactggttcaacctggcggaagcctgagactgtcttgtgccgcctctggcagaaccttcagcagcctgtttatgggctgggtccgacaggcccctggcaaaggactggaactggtgtctgccatcagccggtacagcctgtacacctactacgccgacagcgtgaagggcagattcaccatcagcagagacaacgccaagaacaccctgtacctccagatgaacagcctgcggcctgaggataccgccgtgtactactgcgccagcaaacttgagtacaccagcaacgactacgacagctggggccagggaacactggtcacagtctcttctggtaccggcggaggcggatctggcggcggaggtagcggtggcggaggatctgaattcgacatccagatgacacagagccctagcagcctgtctgccagcgtgggagacagagtgaccatcacatgcaaggccagcgaccacatcaacaactggctggcctggtatcagcagaagcctggacaggcccctaagctgctgatctacggcgctaccacactggaaacaggcgtgcccagcagattttctggcagcggctctggcaccgactacaccctgacaatatccagcctccagcctgaggacttcgccacctactactgtcagcagagctggaacaccccttggacattcggccagggcaccaagctggaaatcaagagactcgagatccagaaccctgatcctgccgtgtaccagctgcgggatagcaagagcagcgacaagagcgtgtgtctgttcaccgacttcgacagccagaccaacgtgtcccagagcaaggactccgacgtgtacatcaccgataagtgcgtgctggacatgcggagcatggacttcaagagcaactccgccgtggcctggtccaacaagtccgatttcgcctgcgccaacgccttcaacaacagcattatccccgaggacacattcttcccaagcagcgacgtgccctgcgacgtgaagctggtggaaaagagcttcgagacagacaccaacctgaacttccagaacctgagcgtgatcggcttcagaatcctgctgctgaaagtggccggctttaacctgctgatgaccctgcggctgtggtccagccgcgccaagagaagcggatctggcgtgaagcagaccctgaatttcgacctgctgaagctggctggcgacgtggaatccaacccaggccctactagtgccaccatggactggatttggcgcatccttttccttgtcggcgctgctaccggcgcccattccgggccccaggttcagctgcaagagtctggcggaggacttgctcaagctggcggaagcctgagactgtcttgtgccgcctctggcagaaccttcagcatgggctggtttagacaggcccctggcaaagagagagagttcgtcgccgccatcacatacagcggcggcagcccttactacgcctcttctgtcagaggccggttcaccatcagccgggacaacgccaagaacaccgtgtacctccagatgaacagcctgaagccagaggacaccgccgtgtactactgtgccgccaatccaacctacggcagcgactggaatgccgagaattggggccagggcacccaagtgacagtgtctagtggatccggcggcggaggatctggcggaggcggatctgggggcggaggctctttcgaacaagttcagcttcaacagcctggcgctgagctggtcaaacctggcgcttctgtgaagatgagctgcaaagccagcggctacgccttcagcagctactggatcaactggatgaagcagaaacccggccagggactcgaatggatcggccaaatctatcccggcgacggcgacaccaactacaacggcaagttcaagggcagagccacactgaccgccgatacctctagcagcacagcctacatgcagctgagcagcctgaccagcgaagatagcgccgtgtacttctgtgcccggtccatcacaacagtcgtgggctgcgctatggactattggggccagggaacaagcgtgaccgtgtctagtacgcgtgaggacctgaagaacgtgttcccacctgaggtggccgtgttcgagcctagcaaggccgagatcgcccacacccagaaagccaccctcgtgtgcctggctaccggcttctaccccgaccatgtggaactgtcttggtgggtcaacggcaaagaggtgcacagcggcgtgtgtaccgacccccagccactgaaagaacagcccgccctgaacgacagccggtactgcctgagcagcagactgagagtgtccgccaccttctggcagaacccccggaaccacttcagatgccaggtgcagttctacggcctgagcgagaacgacgagtggacccaggacagagccaagcccgtgacccagatcgtgtctgccgaagcctggggcagagccgattgcggcatcaccagcgccagctaccaccagggcgtgctgagcgccaccatcctgtacgagatcctgctgggcaaggccaccctgtacgccgtgctggtgtctgccctggtgctgatggctatggtcaagcggaaggacagccggggaagggccaagcgatctggatctggagcaacaaacttctcactactcaaacaagcaggtgacgtggaggagaatcccgggccttctagaggccatatgaccgagtacaagcccacggtgcgcctcgccacccgcgacgacgtccccagggccgtacgcaccctcgccgccgcgttcgccgactaccccgccacgcgccacaccgtcgatccggaccgccacatcgagcgggtcaccgagctgcaagaactcttcctcacgcgcgtcgggctcgacatcggcaaggtgtgggtcgcggacgacggcgccgcggtggcggtctggaccacgccggagagcgtcgaagcgggggcggtgttcgccgagatcggcccgcgcatggccgagttgagcggttcccggctggccgcgcagcaacagatggaaggcctcctggcgccgcaccggcccaaggagcccgcgtggttcctggccaccgtcggcgtctcgcccgaccaccagggcaagggtctgggcagcgccgtcgtgctccccggagtggaggcggccgagcgcgccggggtgcccgccttcctggagacctccgcgccccgcaacctccccttctacgagcggctcggcttcaccgtcaccgccgacgtcgaggtgcccgaaggaccgcgcacctggtgcatgacccgcaagcccggtgcctga

SEQ ID NO: 22168 - DNA, 3429 bp, Artificial Sequence
  Synthetic Polynucleotide
atggccttaccagtgaccgccttgctcctgccgctggccttgctgctccacgccgccaggccggaagtgcagctggttgaatctggcggaggactggttcagcctggcggatctctgagactgagctgtgaagccagcggcttcgccagcgacgattacatcatcggctggttcagacaggcccctggcaaagagagagagggcgtcagctgcatcagctctaagtacgccaacaccgtgtacaccgacagcgtgaagggcagattcagactgagcagaggcaccgccaagaataccgtgtacctccagatgagcgccctgaagcctgaggataccgccgtgtactactgcgctatggacagccgcagagtgacatgccctgagatcagcaccatgcaccggaacttcgattcttggggccagggcacactggtcacagtgtcatctggtaccggcggaggcggatctggcggcggaggtagcggtggcggaggatctgaattcgacatccagatgacacagagccctagcagcctgtctgccagcgtgggagacagagtgaccatcacatgcaaggccagcgaccacatcaacaactggctggcctggtatcagcagaagcctggacaggcccctaagctgctgatctacggcgctaccacactggaaacaggcgtgcccagcagattttctggcagcggctctggcaccgactacaccctgacaatatccagcctccagcctgaggacttcgccacctactactgtcagcagagctggaacaccccttggacattcggccagggcaccaagctggaaatcaagagactcgagatccagaaccctgatcctgccgtgtaccagctgcgggatagcaagagcagcgacaagagcgtgtgtctgttcaccgacttcgacagccagaccaacgtgtcccagagcaaggactccgacgtgtacatcaccgataagtgcgtgctggacatgcggagcatggacttcaagagcaactccgccgtggcctggtccaacaagtccgatttcgcctgcgccaacgccttcaacaacagcattatccccgaggacacattcttcccaagcagcgacgtgccctgcgacgtgaagctggtggaaaagagcttcgagacagacaccaacctgaacttccagaacctgagcgtgatcggcttcagaatcctgctgctgaaagtggccggctttaacctgctgatgaccctgcggctgtggtccagccgcgccaagagaagcggatctggcgtgaagcagaccctgaatttcgacctgctgaagctggctggcgacgtggaatccaacccaggccctactagtgccaccatggactggatttggcgcatccttttccttgtcggcgctgctaccggcgcccattccgggccccaggttcagctgcaagagtctggcggaggacttgctcaagctggcggaagcctgagactgtcttgtgccgcctctggcagaaccttcagcatgggctggtttagacaggcccctggcaaagagagagagttcgtcgccgccatcacatacagcggcggcagcccttactacgcctcttctgtcagaggccggttcaccatcagccgggacaacgccaagaacaccgtgtacctccagatgaacagcctgaagccagaggacaccgccgtgtactactgtgccgccaatccaacctacggcagcgactggaatgccgagaattggggccagggcacccaagtgacagtgtctagtggatccggcggcggaggatctggcggaggcggatctgggggcggaggctctttcgaacaagttcagcttcaacagcctggcgctgagctggtcaaacctggcgcttctgtgaagatgagctgcaaagccagcggctacgccttcagcagctactggatcaactggatgaagcagaaacccggccagggactcgaatggatcggccaaatctatcccggcgacggcgacaccaactacaacggcaagttcaagggcagagccacactgaccgccgatacctctagcagcacagcctacatgcagctgagcagcctgaccagcgaagatagcgccgtgtacttctgtgcccggtccatcacaacagtcgtgggctgcgctatggactattggggccagggaacaagcgtgaccgtgtctagtacgcgtgaggacctgaagaacgtgttcccacctgaggtggccgtgttcgagcctagcaaggccgagatcgcccacacccagaaagccaccctcgtgtgcctggctaccggcttctaccccgaccatgtggaactgtcttggtgggtcaacggcaaagaggtgcacagcggcgtgtgtaccgacccccagccactgaaagaacagcccgccctgaacgacagccggtactgcctgagcagcagactgagagtgtccgccaccttctggcagaacccccggaaccacttcagatgccaggtgcagttctacggcctgagcgagaacgacgagtggacccaggacagagccaagcccgtgacccagatcgtgtctgccgaagcctggggcagagccgattgcggcatcaccagcgccagctaccaccagggcgtgctgagcgccaccatcctgtacgagatcctgctgggcaaggccaccctgtacgccgtgctggtgtctgccctggtgctgatggctatggtcaagcggaaggacagccggggaagggccaagcgatctggatctggagcaacaaacttctcactactcaaacaagcaggtgacgtggaggagaatcccgggccttctagaggccatatgaccgagtacaagcccacggtgcgcctcgccacccgcgacgacgtccccagggccgtacgcaccctcgccgccgcgttcgccgactaccccgccacgcgccacaccgtcgatccggaccgccacatcgagcgggtcaccgagctgcaagaactcttcctcacgcgcgtcgggctcgacatcggcaaggtgtgggtcgcggacgacggcgccgcggtggcggtctggaccacgccggagagcgtcgaagcgggggcggtgttcgccgagatcggcccgcgcatggccgagttgagcggttcccggctggccgcgcagcaacagatggaaggcctcctggcgccgcaccggcccaaggagcccgcgtggttcctggccaccgtcggcgtctcgcccgaccaccagggcaagggtctgggcagcgccgtcgtgctccccggagtggaggcggccgagcgcgccggggtgcccgccttcctggagacctccgcgccccgcaacctccccttctacgagcggctcggcttcaccgtcaccgccgacgtcgaggtgcccgaaggaccgcgcacctggtgcatgacccgcaagcccggtgcctga

SEQ ID NO: 22169 - DNA, 3429 bp, Artificial Sequence
  Synthetic Polynucleotide
atggccttaccagtgaccgccttgctcctgccgctggccttgctgctccacgccgccaggccggaagtgcagctggttgaatctggcggaggactggttcagcctggcggatctctgagactgtcttgtgccgcctctggcttcgccagcgactactatatcatcggctggttcagacaggcccctggcaaagagagagagggcgtcagctgtatcagcagcagatacgccaacaccaactacgccgacagcgtgaagggcagattcaccatcagccgggacaacgccaagaacaccgtgtacctccagatgaacagcctgaagcctgaggacaccgccgtgtactactgtgccgccgacaccagaagatacacctgtcctgacattgccaccatgcaccggaacttcgattcttggggccagggcacactggtcaccgtttcttctggtaccggcggaggcggatctggcggcggaggtagcggtggcggaggatctgaattcgacatccagatgacacagagccctagcagcctgtctgccagcgtgggagacagagtgaccatcacatgcaaggccagcgaccacatcaacaactggctggcctggtatcagcagaagcctggacaggcccctaagctgctgatctacggcgctaccacactggaaacaggcgtgcccagcagattttctggcagcggctctggcaccgactacaccctgacaatatccagcctccagcctgaggacttcgccacctactactgtcagcagagctggaacaccccttggacattcggccagggcaccaagctggaaatcaagagactcgagatccagaaccctgatcctgccgtgtaccagctgcgggatagcaagagcagcgacaagagcgtgtgtctgttcaccgacttcgacagccagaccaacgtgtcccagagcaaggactccgacgtgtacatcaccgataagtgcgtgctggacatgcggagcatggacttcaagagcaactccgccgtggcctggtccaacaagtccgatttcgcctgcgccaacgccttcaacaacagcattatccccgaggacacattcttcccaagcagcgacgtgccctgcgacgtgaagctggtggaaaagagcttcgagacagacaccaacctgaacttccagaacctgagcgtgatcggcttcagaatcctgctgctgaaagtggccggctttaacctgctgatgaccctgcggctgtggtccagccgcgccaagagaagcggatctggcgtgaagcagaccctgaatttcgacctgctgaagctggctggcgacgtggaatccaacccaggccctactagtgccaccatggactggatttggcgcatccttttccttgtcggcgctgctaccggcgcccattccgggccccaggttcagctgcaagagtctggcggaggacttgctcaagctggcggaagcctgagactgtcttgtgccgcctctggcagaaccttcagcatgggctggtttagacaggcccctggcaaagagagagagttcgtcgccgccatcacatacagcggcggcagcccttactacgcctcttctgtcagaggccggttcaccatcagccgggacaacgccaagaacaccgtgtacctccagatgaacagcctgaagccagaggacaccgccgtgtactactgtgccgccaatccaacctacggcagcgactggaatgccgagaattggggccagggcacccaagtgacagtgtctagtggatccggcggcggaggatctggcggaggcggatctgggggcggaggctctttcgaacaagttcagcttcaacagcctggcgctgagctggtcaaacctggcgcttctgtgaagatgagctgcaaagccagcggctacgccttcagcagctactggatcaactggatgaagcagaaacccggccagggactcgaatggatcggccaaatctatcccggcgacggcgacaccaactacaacggcaagttcaagggcagagccacactgaccgccgatacctctagcagcacagcctacatgcagctgagcagcctgaccagcgaagatagcgccgtgtacttctgtgcccggtccatcacaacagtcgtgggctgcgctatggactattggggccagggaacaagcgtgaccgtgtctagtacgcgtgaggacctgaagaacgtgttcccacctgaggtggccgtgttcgagcctagcaaggccgagatcgcccacacccagaaagccaccctcgtgtgcctggctaccggcttctaccccgaccatgtggaactgtcttggtgggtcaacggcaaagaggtgcacagcggcgtgtgtaccgacccccagccactgaaagaacagcccgccctgaacgacagccggtactgcctgagcagcagactgagagtgtccgccaccttctggcagaacccccggaaccacttcagatgccaggtgcagttctacggcctgagcgagaacgacgagtggacccaggacagagccaagcccgtgacccagatcgtgtctgccgaagcctggggcagagccgattgcggcatcaccagcgccagctaccaccagggcgtgctgagcgccaccatcctgtacgagatcctgctgggcaaggccaccctgtacgccgtgctggtgtctgccctggtgctgatggctatggtcaagcggaaggacagccggggaagggccaagcgatctggatctggagcaacaaacttctcactactcaaacaagcaggtgacgtggaggagaatcccgggccttctagaggccatatgaccgagtacaagcccacggtgcgcctcgccacccgcgacgacgtccccagggccgtacgcaccctcgccgccgcgttcgccgactaccccgccacgcgccacaccgtcgatccggaccgccacatcgagcgggtcaccgagctgcaagaactcttcctcacgcgcgtcgggctcgacatcggcaaggtgtgggtcgcggacgacggcgccgcggtggcggtctggaccacgccggagagcgtcgaagcgggggcggtgttcgccgagatcggcccgcgcatggccgagttgagcggttcccggctggccgcgcagcaacagatggaaggcctcctggcgccgcaccggcccaaggagcccgcgtggttcctggccaccgtcggcgtctcgcccgaccaccagggcaagggtctgggcagcgccgtcgtgctccccggagtggaggcggccgagcgcgccggggtgcccgccttcctggagacctccgcgccccgcaacctccccttctacgagcggctcggcttcaccgtcaccgccgacgtcgaggtgcccgaaggaccgcgcacctggtgcatgacccgcaagcccggtgcctga

SEQ ID NO: 22170 - DNA, 3207 bp, Artificial Sequence
  Synthetic Polynucleotide
atggccttaccagtgaccgccttgctcctgccgctggccttgctgctccacgccgccaggccggacatccagatgacacagagccctagcagcctgtctgccagcgtgggagacagagtgaccatcacatgcaaggccagcgaccacatcaacaactggctggcctggtatcagcagaagcctggacaggcccctaagctgctgatctacggcgctaccacactggaaacaggcgtgcccagcagattttctggcagcggctctggcaccgactacaccctgacaatatccagcctccagcctgaggacttcgccacctactactgtcagcagagctggaacaccccttggacattcggccagggcaccaagctggaaatcaagagactcgaggacctgaagaacgtgttcccacctgaggtggccgtgttcgagcctagcgaggccgagatcagccacacccagaaagccaccctcgtgtgcctggctaccggcttctaccccgaccatgtggaactgtcttggtgggtcaacggcaaagaggtgcacagcggcgtgtgtaccgacccccagccactgaaagaacagcccgccctgaacgacagccggtactgcctgagcagcagactgagagtgtccgccaccttctggcagaacccccggaaccacttcagatgccaggtgcagttctacggcctgagcgagaacgacgagtggacccaggacagagccaagcccgtgacccagatcgtgtctgccgaagcctggggcagagccgattgcggctttaccagcgagagctaccagcagggcgtgctgagcgccaccatcctgtacgagatcctgctgggcaaggccaccctgtacgccgtgctggtgtctgccctggtgctgatggctatggtcaagcggaaggacagccggggaagggccaagcgatctggatctggagcaacaaacttctcactactcaaacaagcaggtgacgtggaggagaatcccgggcctactagtgccaccatggactggatttggcgcatccttttccttgtcggcgctgctaccggcgcccattccgggcccggcatgagaaccgaggacctgcctaaggccgtggtgttcctggaaccccagtggtacagagtgctggaaaaggacagcgtgaccctgaagtgccagggcgcctacagccccgaggacaatagcacccagtggttccacaacgagagcctgatctccagccaggccagcagctacttcatcgacgccgccaccgtggacgacagcggcgagtatagatgccagaccaacctgagcaccctgagcgaccccgtgcagctggaagtgcacatcggatggctgctgctgcaggcccccagatgggtgttcaaagaagaggaccccatccacctgagatgccactcttggaagaacaccgccctgcacaaagtgacctacctgcagaacggcaagggcagaaagtacttccaccacaacagcgacttctacatccccaaggccaccctgaaggactccggctcctacttctgcagaggcctcgtgggcagcaagaacgtgtccagcgagacagtgaacatcaccatcacccagggcctggccgtgtctaccatcagcagctttttcccacccggctaccagggatccggcggcggaggatctggcggaggcggatctgggggcggaggctctttcgaacaagttcagcttcaacagcctggcgctgagctggtcaaacctggcgcttctgtgaagatgagctgcaaagccagcggctacgccttcagcagctactggatcaactggatgaagcagaaacccggccagggactcgaatggatcggccaaatctatcccggcgacggcgacaccaactacaacggcaagttcaagggcagagccacactgaccgccgatacctctagcagcacagcctacatgcagctgagcagcctgaccagcgaagatagcgccgtgtacttctgtgcccggtccatcacaacagtcgtgggctgcgctatggactattggggccagggaacaagcgtgaccgtgtctagtacgcgtatccagaaccctgatcctgccgtgtaccagctgcgggatagcaagagcagcgacaagagcgtgtgtctgttcaccgacttcgacagccagaccaacgtgtcccagagcaaggactccgacgtgtacatcaccgataagtgcgtgctggacatgcggagcatggacttcaagagcaactccgccgtggcctggtccaacaagtccgatttcgcctgcgccaacgccttcaacaacagcattatccccgaggacacattcttcccaagccccgagagcagctgcgacgtgaagctggtggaaaagagcttcgagacagacaccaacctgaacttccagaacctgagcgtgatcggcttcagaatcctgctgctgaaagtggccggctttaacctgctgatgaccctgcggctgtggtccagccgcgccaagagaagcggatctggcgtgaagcagaccctgaatttcgacctgctgaagctggctggcgacgtggaatccaacccaggcccttctagaggccatatgaccgagtacaagcccacggtgcgcctcgccacccgcgacgacgtccccagggccgtacgcaccctcgccgccgcgttcgccgactaccccgccacgcgccacaccgtcgatccggaccgccacatcgagcgggtcaccgagctgcaagaactcttcctcacgcgcgtcgggctcgacatcggcaaggtgtgggtcgcggacgacggcgccgcggtggcggtctggaccacgccggagagcgtcgaagcgggggcggtgttcgccgagatcggcccgcgcatggccgagttgagcggttcccggctggccgcgcagcaacagatggaaggcctcctggcgccgcaccggcccaaggagcccgcgtggttcctggccaccgtcggcgtctcgcccgaccaccagggcaagggtctgggcagcgccgtcgtgctccccggagtggaggcggccgagcgcgccggggtgcccgccttcctggagacctccgcgccccgcaacctccccttctacgagcggctcggcttcaccgtcaccgccgacgtcgaggtgcccgaaggaccgcgcacctggtgcatgacccgcaagcccggtgcctga

SEQ ID NO: 22171 - DNA, 3618 bp, Artificial Sequence
  Synthetic Polynucleotide
atggccttaccagtgaccgccttgctcctgccgctggccttgctgctccacgccgccaggccgggcatgcggactgaagacctcccaaaggctgtggtgttcctggagcctcaatggtacagggtgctggagaaggacagtgtgactctgaagtgccagggagcctactcccctgaggacaattccacacagtggtttcacaatgagagcctcatctcaagccaggcctccagctacttcattgacgctgccacagtggacgacagtggagagtacaggtgccagacaaacctctccaccctcagtgacccggtgcagctagaagtccatatcggctggctgttgctccaggcccctcggtgggtgttcaaggaggaagaccctattcacctgaggtgtcacagctggaagaacactgctctgcataaggtcacatatttacagaatggcaaaggcaggaagtattttcatcataattctgacttctacattccaaaagccacactcaaagacagcggctcctacttctgcagggggcttgttgggagtaaaaatgtgtcttcagagactgtgaacatcaccatcactcaaggtttggcagtgtcaaccatctcatcattctttccacctggctaccaaggtaccggcggaggcggatctggcggcggaggtagcggtggcggaggatctgaattcgacatccagatgacacagagccctagcagcctgtctgccagcgtgggagacagagtgaccatcacatgcaaggccagcgaccacatcaacaactggctggcctggtatcagcagaagcctggacaggcccctaagctgctgatctacggcgctaccacactggaaacaggcgtgcccagcagattttctggcagcggctctggcaccgactacaccctgacaatatccagcctccagcctgaggacttcgccacctactactgtcagcagagctggaacaccccttggacattcggccagggcaccaagctggaaatcaagagactcgaggacctgaagaacgtgttcccacctgaggtggccgtgttcgagcctagcaaggccgagatcgcccacacccagaaagccaccctcgtgtgcctggctaccggcttctaccccgaccatgtggaactgtcttggtgggtcaacggcaaagaggtgcacagcggcgtgtgtaccgacccccagccactgaaagaacagcccgccctgaacgacagccggtactgcctgagcagcagactgagagtgtccgccaccttctggcagaacccccggaaccacttcagatgccaggtgcagttctacggcctgagcgagaacgacgagtggacccaggacagagccaagcccgtgacccagatcgtgtctgccgaagcctggggcagagccgattgcggcatcaccagcgccagctaccaccagggcgtgctgagcgccaccatcctgtacgagatcctgctgggcaaggccaccctgtacgccgtgctggtgtctgccctggtgctgatggctatggtcaagcggaaggacagccggggaagggccaagcgatctggatctggagcaacaaacttctcactactcaaacaagcaggtgacgtggaggagaatcccgggcctactagtgccaccatggactggatttggcgcatccttttccttgtcggcgctgctaccggcgcccattccgggccccaggttcagctgcaagagtctggcggaggacttgctcaagctggcggaagcctgagactgtcttgtgccgcctctggcagaaccttcagcatgggctggtttagacaggcccctggcaaagagagagagttcgtcgccgccatcacatacagcggcggcagcccttactacgcctcttctgtcagaggccggttcaccatcagccgggacaacgccaagaacaccgtgtacctccagatgaacagcctgaagccagaggacaccgccgtgtactactgtgccgccaatccaacctacggcagcgactggaatgccgagaattggggccagggcacccaagtgacagtgtctagtggatccggcggcggaggatctggcggaggcggatctgggggcggaggctctttcgaacaagttcagcttcaacagcctggcgctgagctggtcaaacctggcgcttctgtgaagatgagctgcaaagccagcggctacgccttcagcagctactggatcaactggatgaagcagaaacccggccagggactcgaatggatcggccaaatctatcccggcgacggcgacaccaactacaacggcaagttcaagggcagagccacactgaccgccgatacctctagcagcacagcctacatgcagctgagcagcctgaccagcgaagatagcgccgtgtacttctgtgcccggtccatcacaacagtcgtgggctgcgctatggactattggggccagggaacaagcgtgaccgtgtctagtacgcgtatccagaaccctgatcctgccgtgtaccagctgcgggatagcaagagcagcgacaagagcgtgtgtctgttcaccgacttcgacagccagaccaacgtgtcccagagcaaggactccgacgtgtacatcaccgataagtgcgtgctggacatgcggagcatggacttcaagagcaactccgccgtggcctggtccaacaagtccgatttcgcctgcgccaacgccttcaacaacagcattatccccgaggacacattcttcccaagcagcgacgtgccctgcgacgtgaagctggtggaaaagagcttcgagacagacaccaacctgaacttccagaacctgagcgtgatcggcttcagaatcctgctgctgaaagtggccggctttaacctgctgatgaccctgcggctgtggtccagccgcgccaagagaagcggatctggcgtgaagcagaccctgaatttcgacctgctgaagctggctggcgacgtggaatccaacccaggcccttctagaggccatatgaccgagtacaagcccacggtgcgcctcgccacccgcgacgacgtccccagggccgtacgcaccctcgccgccgcgttcgccgactaccccgccacgcgccacaccgtcgatccggaccgccacatcgagcgggtcaccgagctgcaagaactcttcctcacgcgcgtcgggctcgacatcggcaaggtgtgggtcgcggacgacggcgccgcggtggcggtctggaccacgccggagagcgtcgaagcgggggcggtgttcgccgagatcggcccgcgcatggccgagttgagcggttcccggctggccgcgcagcaacagatggaaggcctcctggcgccgcaccggcccaaggagcccgcgtggttcctggccaccgtcggcgtctcgcccgaccaccagggcaagggtctgggcagcgccgtcgtgctccccggagtggaggcggccgagcgcgccggggtgcccgccttcctggagacctccgcgccccgcaacctccccttctacgagcggctcggcttcaccgtcaccgccgacgtcgaggtgcccgaaggaccgcgcacctggtgcatgacccgcaagcccggtgcctga

SEQ ID NO: 22172 - DNA, 3201 bp, Artificial Sequence
  Synthetic Polynucleotide
atggccttaccagtgaccgccttgctcctgccgctggccttgctgctccacgccgccaggccgggcatgcggactgaagacctcccaaaggctgtggtgttcctggagcctcaatggtacagggtgctggagaaggacagtgtgactctgaagtgccagggagcctactcccctgaggacaattccacacagtggtttcacaatgagagcctcatctcaagccaggcctccagctacttcattgacgctgccacagtggacgacagtggagagtacaggtgccagacaaacctctccaccctcagtgacccggtgcagctagaagtccatatcggctggctgttgctccaggcccctcggtgggtgttcaaggaggaagaccctattcacctgaggtgtcacagctggaagaacactgctctgcataaggtcacatatttacagaatggcaaaggcaggaagtattttcatcataattctgacttctacattccaaaagccacactcaaagacagcggctcctacttctgcagggggcttgttgggagtaaaaatgtgtcttcagagactgtgaacatcaccatcactcaaggtttggcagtgtcaaccatctcatcattctttccacctggctaccaaggtaccggcggaggcggatctggcggcggaggtagcggtggcggaggatctgaattcgacatccagatgacacagagccctagcagcctgtctgccagcgtgggagacagagtgaccatcacatgcaaggccagcgaccacatcaacaactggctggcctggtatcagcagaagcctggacaggcccctaagctgctgatctacggcgctaccacactggaaacaggcgtgcccagcagattttctggcagcggctctggcaccgactacaccctgacaatatccagcctccagcctgaggacttcgccacctactactgtcagcagagctggaacaccccttggacattcggccagggcaccaagctggaaatcaagagactcgaggacctgaagaacgtgttcccacctgaggtggccgtgttcgagcctagcgaggccgagatcagccacacccagaaagccaccctcgtgtgcctggctaccggcttctaccccgaccatgtggaactgtcttggtgggtcaacggcaaagaggtgcacagcggcgtgtgtaccgacccccagccactgaaagaacagcccgccctgaacgacagccggtactgcctgagcagcagactgagagtgtccgccaccttctggcagaacccccggaaccacttcagatgccaggtgcagttctacggcctgagcgagaacgacgagtggacccaggacagagccaagcccgtgacccagatcgtgtctgccgaagcctggggcagagccgattgcggctttaccagcgagagctaccagcagggcgtgctgagcgccaccatcctgtacgagatcctgctgggcaaggccaccctgtacgccgtgctggtgtctgccctggtgctgatggctatggtcaagcggaaggacagccggggaagggccaagcgatctggatctggagcaacaaacttctcactactcaaacaagcaggtgacgtggaggagaatcccgggcctactagtatggactggatttggcgcatccttttccttgtcggcgctgctaccggcgcgcattccttcgaacaagttcagcttcaacagcctggcgctgagctggtcaaacctggcgcttctgtgaagatgagctgcaaagccagcggctacgccttcagcagctactggatcaactggatgaagcagaaacccggccagggactcgaatggatcggccaaatctatcccggcgacggcgacaccaactacaacggcaagttcaagggcagagccacactgaccgccgatacctctagcagcacagcctacatgcagctgagcagcctgaccagcgaagatagcgccgtgtacttctgtgcccggtccatcacaacagtcgtgggctgcgctatggactattggggccagggaacaagcgtgaccgtgtctagtacgcgtatccagaaccctgatcctgccgtgtaccagctgcgggatagcaagagcagcgacaagagcgtgtgtctgttcaccgacttcgacagccagaccaacgtgtcccagagcaaggactccgacgtgtacatcaccgataagtgcgtgctggacatgcggagcatggacttcaagagcaactccgccgtggcctggtccaacaagtccgatttcgcctgcgccaacgccttcaacaacagcattatccccgaggacacattcttcccaagccccgagagcagctgcgacgtgaagctggtggaaaagagcttcgagacagacaccaacctgaacttccagaacctgagcgtgatcggcttcagaatcctgctgctgaaagtggccggctttaacctgctgatgaccctgcggctgtggtccagccgcgccaagagaagcggatctggcgtgaagcagaccctgaatttcgacctgctgaagctggctggcgacgtggaatccaacccaggcccttctagaggccatatgaccgagtacaagcccacggtgcgcctcgccacccgcgacgacgtccccagggccgtacgcaccctcgccgccgcgttcgccgactaccccgccacgcgccacaccgtcgatccggaccgccacatcgagcgggtcaccgagctgcaagaactcttcctcacgcgcgtcgggctcgacatcggcaaggtgtgggtcgcggacgacggcgccgcggtggcggtctggaccacgccggagagcgtcgaagcgggggcggtgttcgccgagatcggcccgcgcatggccgagttgagcggttcccggctggccgcgcagcaacagatggaaggcctcctggcgccgcaccggcccaaggagcccgcgtggttcctggccaccgtcggcgtctcgcccgaccaccagggcaagggtctgggcagcgccgtcgtgctccccggagtggaggcggccgagcgcgccggggtgcccgccttcctggagacctccgcgccccgcaacctccccttctacgagcggctcggcttcaccgtcaccgccgacgtcgaggtgcccgaaggaccgcgcacctggtgcatgacccgcaagcccggtgcctga

SEQ ID NO: 22173 - DNA, 3618 bp, Artificial Sequence
  Synthetic Polynucleotide
atggccttaccagtgaccgccttgctcctgccgctggccttgctgctccacgccgccaggccgggcatgcggactgaagacctcccaaaggctgtggtgttcctggagcctcaatggtacagggtgctggagaaggacagtgtgactctgaagtgccagggagcctactcccctgaggacaattccacacagtggtttcacaatgagagcctcatctcaagccaggcctccagctacttcattgacgctgccacagtggacgacagtggagagtacaggtgccagacaaacctctccaccctcagtgacccggtgcagctagaagtccatatcggctggctgttgctccaggcccctcggtgggtgttcaaggaggaagaccctattcacctgaggtgtcacagctggaagaacactgctctgcataaggtcacatatttacagaatggcaaaggcaggaagtattttcatcataattctgacttctacattccaaaagccacactcaaagacagcggctcctacttctgcagggggcttgttgggagtaaaaatgtgtcttcagagactgtgaacatcaccatcactcaaggtttggcagtgtcaaccatctcatcattctttccacctggctaccaaggtaccggcggaggcggatctggcggcggaggtagcggtggcggaggatctgaattcgacatccagatgacacagagccctagcagcctgtctgccagcgtgggagacagagtgaccatcacctgtagagccagccaggacatcagcaactacctgaactggtatcagcagaaacccggcaaggccgtgaagctgctgatctactacaccagcatcctgcacagcggcgtgcccagcagattttctggctctggcagcggcaccgactacaccctgacaatatctagcctccagcctgaggacttcgctacctacttctgccagcaaggcaacaccctgccttggacatttggcggaggcaccaaggtggaaatcaaactcgaggacctgaagaacgtgttcccacctgaggtggccgtgttcgagcctagcaaggccgagatcgcccacacccagaaagccaccctcgtgtgcctggctaccggcttctaccccgaccatgtggaactgtcttggtgggtcaacggcaaagaggtgcacagcggcgtgtgtaccgacccccagccactgaaagaacagcccgccctgaacgacagccggtactgcctgagcagcagactgagagtgtccgccaccttctggcagaacccccggaaccacttcagatgccaggtgcagttctacggcctgagcgagaacgacgagtggacccaggacagagccaagcccgtgacccagatcgtgtctgccgaagcctggggcagagccgattgcggcatcaccagcgccagctaccaccagggcgtgctgagcgccaccatcctgtacgagatcctgctgggcaaggccaccctgtacgccgtgctggtgtctgccctggtgctgatggctatggtcaagcggaaggacagccggggaagggccaagcgatctggatctggagcaacaaacttctcactactcaaacaagcaggtgacgtggaggagaatcccgggcctactagtgccaccatggactggatttggcgcatccttttccttgtcggcgctgctaccggcgcccattccgggccccaggttcagctgcaagagtctggcggaggacttgctcaagctggcggaagcctgagactgtcttgtgccgcctctggcagaaccttcagcatgggctggtttagacaggcccctggcaaagagagagagttcgtcgccgccatcacatacagcggcggcagcccttactacgcctcttctgtcagaggccggttcaccatcagccgggacaacgccaagaacaccgtgtacctccagatgaacagcctgaagccagaggacaccgccgtgtactactgtgccgccaatccaacctacggcagcgactggaatgccgagaattggggccagggcacccaagtgacagtgtctagtggatccggcggcggaggatctggcggaggcggatctgggggcggaggctctttcgaagtgcagctggttgagtctggcggcggacttgtgaaacctggcggaagcctgaagctgagctgtgccgcttctggcttcgccttcagcatctacgacatgagctgggtccgacaggcccctggcaaaggacttgagtgggtcgcctacatcagctctggcggagggacaacctactatcccgacaccgtgaagggcagattcaccatcagccgggacaacgccaagaacaccctgtacctccagatgagcagcctgagagccgaggacaccgccatgtactactgtgccagacacagcggctacggcagctcttacggcgtgctgtttgcctattggggccagggcacactggtcaccgttagctctacgcgtatccagaaccctgatcctgccgtgtaccagctgcgggatagcaagagcagcgacaagagcgtgtgtctgttcaccgacttcgacagccagaccaacgtgtcccagagcaaggactccgacgtgtacatcaccgataagtgcgtgctggacatgcggagcatggacttcaagagcaactccgccgtggcctggtccaacaagtccgatttcgcctgcgccaacgccttcaacaacagcattatccccgaggacacattcttcccaagcagcgacgtgccctgcgacgtgaagctggtggaaaagagcttcgagacagacaccaacctgaacttccagaacctgagcgtgatcggcttcagaatcctgctgctgaaagtggccggctttaacctgctgatgaccctgcggctgtggtccagccgcgccaagagaagcggatctggcgtgaagcagaccctgaatttcgacctgctgaagctggctggcgacgtggaatccaacccaggcccttctagaggccatatgaccgagtacaagcccacggtgcgcctcgccacccgcgacgacgtccccagggccgtacgcaccctcgccgccgcgttcgccgactaccccgccacgcgccacaccgtcgatccggaccgccacatcgagcgggtcaccgagctgcaagaactcttcctcacgcgcgtcgggctcgacatcggcaaggtgtgggtcgcggacgacggcgccgcggtggcggtctggaccacgccggagagcgtcgaagcgggggcggtgttcgccgagatcggcccgcgcatggccgagttgagcggttcccggctggccgcgcagcaacagatggaaggcctcctggcgccgcaccggcccaaggagcccgcgtggttcctggccaccgtcggcgtctcgcccgaccaccagggcaagggtctgggcagcgccgtcgtgctccccggagtggaggcggccgagcgcgccggggtgcccgccttcctggagacctccgcgccccgcaacctccccttctacgagcggctcggcttcaccgtcaccgccgacgtcgaggtgcccgaaggaccgcgcacctggtgcatgacccgcaagcccggtgcctga

SEQ ID NO: 22174 - DNA, 3627 bp, Artificial Sequence
  Synthetic Polynucleotide
atggccttaccagtgaccgccttgctcctgccgctggccttgctgctccacgccgccaggccggcatgcgaagtgcagctgcttgaaagtggcggcggactgattcagcctggcggatctctgagactgagctgtgccgccagcggcttcaccttttctagccacgccatgacctgggtccgacaggcacctggaaaagggcttgaatgggtgtccgccatcagcggctctggcgattacacacactacgccgacagcgtgaagggcagattcaccatcagcagagacaacagcaagaacaccgtgtacctccagatgaacagcctgagagccgaggacagcgccgtgtattattgcgccaaggatgaggatggcggcagcctgcttggacacagaggacaaggcaccctggtcaccgtttcttccggtaccggcggaggcggatctggcggcggaggtagcggtggcggaggatctgaattcgacatccagatgacacagagccctagcagcctgtctgccagcgtgggagacagagtgaccatcacatgcaaggccagcgaccacatcaacaactggctggcctggtatcagcagaagcctggacaggcccctaagctgctgatctacggcgctaccacactggaaacaggcgtgcccagcagattttctggcagcggctctggcaccgactacaccctgacaatatccagcctccagcctgaggacttcgccacctactactgtcagcagagctggaacaccccttggacattcggccagggcaccaagctggaaatcaagagactcgaggacctgaagaacgtgttcccacctgaggtggccgtgttcgagcctagcgaggccgagatcagccacacccagaaagccaccctcgtgtgcctggctaccggcttctaccccgaccatgtggaactgtcttggtgggtcaacggcaaagaggtgcacagcggcgtgtgtaccgacccccagccactgaaagaacagcccgccctgaacgacagccggtactgcctgagcagcagactgagagtgtccgccaccttctggcagaacccccggaaccacttcagatgccaggtgcagttctacggcctgagcgagaacgacgagtggacccaggacagagccaagcccgtgacccagatcgtgtctgccgaagcctggggcagagccgattgcggctttaccagcgagagctaccagcagggcgtgctgagcgccaccatcctgtacgagatcctgctgggcaaggccaccctgtacgccgtgctggtgtctgccctggtgctgatggctatggtcaagcggaaggacagccggggaagggccaagcgatctggatctggagcaacaaacttctcactactcaaacaagcaggtgacgtggaggagaatcccgggcctactagtgccaccatggactggatttggcgcatccttttccttgtcggcgctgctaccggcgcccattccgggcccggcatgagaaccgaggacctgcctaaggccgtggtgttcctggaaccccagtggtacagagtgctggaaaaggacagcgtgaccctgaagtgccagggcgcctacagccccgaggacaatagcacccagtggttccacaacgagagcctgatctccagccaggccagcagctacttcatcgacgccgccaccgtggacgacagcggcgagtatagatgccagaccaacctgagcaccctgagcgaccccgtgcagctggaagtgcacatcggatggctgctgctgcaggcccccagatgggtgttcaaagaagaggaccccatccacctgagatgccactcttggaagaacaccgccctgcacaaagtgacctacctgcagaacggcaagggcagaaagtacttccaccacaacagcgacttctacatccccaaggccaccctgaaggactccggctcctacttctgcagaggcctcgtgggcagcaagaacgtgtccagcgagacagtgaacatcaccatcacccagggcctggccgtgtctaccatcagcagctttttcccacccggctaccagggatccggcggcggaggatctggcggaggcggatctgggggcggaggctctttcgaacaagttcagcttcaacagcctggcgctgagctggtcaaacctggcgcttctgtgaagatgagctgcaaagccagcggctacgccttcagcagctactggatcaactggatgaagcagaaacccggccagggactcgaatggatcggccaaatctatcccggcgacggcgacaccaactacaacggcaagttcaagggcagagccacactgaccgccgatacctctagcagcacagcctacatgcagctgagcagcctgaccagcgaagatagcgccgtgtacttctgtgcccggtccatcacaacagtcgtgggctgcgctatggactattggggccagggaacaagcgtgaccgtgtctagtacgcgtatccagaaccctgatcctgccgtgtaccagctgcgggatagcaagagcagcgacaagagcgtgtgtctgttcaccgacttcgacagccagaccaacgtgtcccagagcaaggactccgacgtgtacatcaccgataagtgcgtgctggacatgcggagcatggacttcaagagcaactccgccgtggcctggtccaacaagtccgatttcgcctgcgccaacgccttcaacaacagcattatccccgaggacacattcttcccaagccccgagagcagctgcgacgtgaagctggtggaaaagagcttcgagacagacaccaacctgaacttccagaacctgagcgtgatcggcttcagaatcctgctgctgaaagtggccggctttaacctgctgatgaccctgcggctgtggtccagccgcgccaagagaagcggatctggcgtgaagcagaccctgaatttcgacctgctgaagctggctggcgacgtggaatccaacccaggcccttctagaggccatatgaccgagtacaagcccacggtgcgcctcgccacccgcgacgacgtccccagggccgtacgcaccctcgccgccgcgttcgccgactaccccgccacgcgccacaccgtcgatccggaccgccacatcgagcgggtcaccgagctgcaagaactcttcctcacgcgcgtcgggctcgacatcggcaaggtgtgggtcgcggacgacggcgccgcggtggcggtctggaccacgccggagagcgtcgaagcgggggcggtgttcgccgagatcggcccgcgcatggccgagttgagcggttcccggctggccgcgcagcaacagatggaaggcctcctggcgccgcaccggcccaaggagcccgcgtggttcctggccaccgtcggcgtctcgcccgaccaccagggcaagggtctgggcagcgccgtcgtgctccccggagtggaggcggccgagcgcgccggggtgcccgccttcctggagacctccgcgccccgcaacctccccttctacgagcggctcggcttcaccgtcaccgccgacgtcgaggtgcccgaaggaccgcgcacctggtgcatgacccgcaagcccggtgcctga

SEQ ID NO: 22175 - DNA, 3618 bp, Artificial Sequence
  Synthetic Polynucleotide
atggccttaccagtgaccgccttgctcctgccgctggccttgctgctccacgccgccaggccggaagtgcagctggttgaatctggcggaggactggttcaggctggcggatctctgagactgtcttgtgccgccagcggcagaacctttagcatgggctggtttagacaggcccctggcaaagagagagagttcgtcgccgccatcacatactctggcggcagcccttactacgccgactctgtgaagggcagattcaccatcagccgggacaacgccaagaacaccgtgtacctccagatgaacagcctgaagcctgaggacaccgccgtgtactactgcgccgccaatccaacatacggcagcgactggaacgccgagaattggggccagggaacccaagtgacagtgtctagcggtaccggcggaggcggatctggcggcggaggtagcggtggcggaggatctgaattcgacatccagatgacacagagccctagcagcctgtctgccagcgtgggagacagagtgaccatcacatgcaaggccagcgaccacatcaacaactggctggcctggtatcagcagaagcctggacaggcccctaagctgctgatctacggcgctaccacactggaaacaggcgtgcccagcagattttctggcagcggctctggcaccgactacaccctgacaatatccagcctccagcctgaggacttcgccacctactactgtcagcagagctggaacaccccttggacattcggccagggcaccaagctggaaatcaagagactcgaggacctgaagaacgtgttcccacctgaggtggccgtgttcgagcctagcgaggccgagatcagccacacccagaaagccaccctcgtgtgcctggctaccggcttctaccccgaccatgtggaactgtcttggtgggtcaacggcaaagaggtgcacagcggcgtgtgtaccgacccccagccactgaaagaacagcccgccctgaacgacagccggtactgcctgagcagcagactgagagtgtccgccaccttctggcagaacccccggaaccacttcagatgccaggtgcagttctacggcctgagcgagaacgacgagtggacccaggacagagccaagcccgtgacccagatcgtgtctgccgaagcctggggcagagccgattgcggctttaccagcgagagctaccagcagggcgtgctgagcgccaccatcctgtacgagatcctgctgggcaaggccaccctgtacgccgtgctggtgtctgccctggtgctgatggctatggtcaagcggaaggacagccggggaagggccaagcgatctggatctggagcaacaaacttctcactactcaaacaagcaggtgacgtggaggagaatcccgggcctactagtgccaccatggactggatttggcgcatccttttccttgtcggcgctgctaccggcgcccattccgggcccggcatgagaaccgaggacctgcctaaggccgtggtgttcctggaaccccagtggtacagagtgctggaaaaggacagcgtgaccctgaagtgccagggcgcctacagccccgaggacaatagcacccagtggttccacaacgagagcctgatctccagccaggccagcagctacttcatcgacgccgccaccgtggacgacagcggcgagtatagatgccagaccaacctgagcaccctgagcgaccccgtgcagctggaagtgcacatcggatggctgctgctgcaggcccccagatgggtgttcaaagaagaggaccccatccacctgagatgccactcttggaagaacaccgccctgcacaaagtgacctacctgcagaacggcaagggcagaaagtacttccaccacaacagcgacttctacatccccaaggccaccctgaaggactccggctcctacttctgcagaggcctcgtgggcagcaagaacgtgtccagcgagacagtgaacatcaccatcacccagggcctggccgtgtctaccatcagcagctttttcccacccggctaccagggatccggcggcggaggatctggcggaggcggatctgggggcggaggctctttcgaacaagttcagcttcaacagcctggcgctgagctggtcaaacctggcgcttctgtgaagatgagctgcaaagccagcggctacgccttcagcagctactggatcaactggatgaagcagaaacccggccagggactcgaatggatcggccaaatctatcccggcgacggcgacaccaactacaacggcaagttcaagggcagagccacactgaccgccgatacctctagcagcacagcctacatgcagctgagcagcctgaccagcgaagatagcgccgtgtacttctgtgcccggtccatcacaacagtcgtgggctgcgctatggactattggggccagggaacaagcgtgaccgtgtctagtacgcgtatccagaaccctgatcctgccgtgtaccagctgcgggatagcaagagcagcgacaagagcgtgtgtctgttcaccgacttcgacagccagaccaacgtgtcccagagcaaggactccgacgtgtacatcaccgataagtgcgtgctggacatgcggagcatggacttcaagagcaactccgccgtggcctggtccaacaagtccgatttcgcctgcgccaacgccttcaacaacagcattatccccgaggacacattcttcccaagccccgagagcagctgcgacgtgaagctggtggaaaagagcttcgagacagacaccaacctgaacttccagaacctgagcgtgatcggcttcagaatcctgctgctgaaagtggccggctttaacctgctgatgaccctgcggctgtggtccagccgcgccaagagaagcggatctggcgtgaagcagaccctgaatttcgacctgctgaagctggctggcgacgtggaatccaacccaggcccttctagaggccatatgaccgagtacaagcccacggtgcgcctcgccacccgcgacgacgtccccagggccgtacgcaccctcgccgccgcgttcgccgactaccccgccacgcgccacaccgtcgatccggaccgccacatcgagcgggtcaccgagctgcaagaactcttcctcacgcgcgtcgggctcgacatcggcaaggtgtgggtcgcggacgacggcgccgcggtggcggtctggaccacgccggagagcgtcgaagcgggggcggtgttcgccgagatcggcccgcgcatggccgagttgagcggttcccggctggccgcgcagcaacagatggaaggcctcctggcgccgcaccggcccaaggagcccgcgtggttcctggccaccgtcggcgtctcgcccgaccaccagggcaagggtctgggcagcgccgtcgtgctccccggagtggaggcggccgagcgcgccggggtgcccgccttcctggagacctccgcgccccgcaacctccccttctacgagcggctcggcttcaccgtcaccgccgacgtcgaggtgcccgaaggaccgcgcacctggtgcatgacccgcaagcccggtgcctga

SEQ ID NO: 22176 - DNA, 3618 bp, Artificial Sequence
  Synthetic Polynucleotide
atggccttaccagtgaccgccttgctcctgccgctggccttgctgctccacgccgccaggccgggcatgcggactgaagacctcccaaaggctgtggtgttcctggagcctcaatggtacagggtgctggagaaggacagtgtgactctgaagtgccagggagcctactcccctgaggacaattccacacagtggtttcacaatgagagcctcatctcaagccaggcctccagctacttcattgacgctgccacagtggacgacagtggagagtacaggtgccagacaaacctctccaccctcagtgacccggtgcagctagaagtccatatcggctggctgttgctccaggcccctcggtgggtgttcaaggaggaagaccctattcacctgaggtgtcacagctggaagaacactgctctgcataaggtcacatatttacagaatggcaaaggcaggaagtattttcatcataattctgacttctacattccaaaagccacactcaaagacagcggctcctacttctgcagggggcttgttgggagtaaaaatgtgtcttcagagactgtgaacatcaccatcactcaaggtttggcagtgtcaaccatctcatcattctttccacctggctaccaaggtaccggcggaggcggatctggcggcggaggtagcggtggcggaggatctgaattcgagatcgtgctgacacagagccctgccaccctgtctctgagccctggcgaaagagccaccctgagctgtagagccagccagagcgtgtccagctacctggcctggtatcagcagaagcccggccaggctccccggctgctgatctacgatgccagcaatagagccaccggcatccccgccagattttccggctctggcagcggcaccgacttcaccctgaccatcagctccctggaacccgaggacttcgccgtgtactactgccagcagcggagcaactggcccatcacattcggccagggcacccggctggaaatcaaactcgaggacctgaagaacgtgttcccacctgaggtggccgtgttcgagcctagcaaggccgagatcgcccacacccagaaagccaccctcgtgtgcctggctaccggcttctaccccgaccatgtggaactgtcttggtgggtcaacggcaaagaggtgcacagcggcgtgtgtaccgacccccagccactgaaagaacagcccgccctgaacgacagccggtactgcctgagcagcagactgagagtgtccgccaccttctggcagaacccccggaaccacttcagatgccaggtgcagttctacggcctgagcgagaacgacgagtggacccaggacagagccaagcccgtgacccagatcgtgtctgccgaagcctggggcagagccgattgcggcatcaccagcgccagctaccaccagggcgtgctgagcgccaccatcctgtacgagatcctgctgggcaaggccaccctgtacgccgtgctggtgtctgccctggtgctgatggctatggtcaagcggaaggacagccggggaagggccaagcgatctggatctggagcaacaaacttctcactactcaaacaagcaggtgacgtggaggagaatcccgggcctactagtgccaccatggactggatttggcgcatccttttccttgtcggcgctgctaccggcgcccattccgggccccaggttcagctgcaagagtctggcggaggacttgctcaagctggcggaagcctgagactgtcttgtgccgcctctggcagaaccttcagcatgggctggtttagacaggcccctggcaaagagagagagttcgtcgccgccatcacatacagcggcggcagcccttactacgcctcttctgtcagaggccggttcaccatcagccgggacaacgccaagaacaccgtgtacctccagatgaacagcctgaagccagaggacaccgccgtgtactactgtgccgccaatccaacctacggcagcgactggaatgccgagaattggggccagggcacccaagtgacagtgtctagtggatccggcggcggaggatctggcggaggcggatctgggggcggaggctctttcgaagaagtgcagctggtggaatcaggcggcggactggtgcagcctggcagaagcctgagactgagctgtgccgccagcggcttcaccttcaacgactacgccatgcactgggtgcgccaggcccctggaaaaggactggaatgggtgtccacaatcagctggaacagcggcagcatcggctacgccgatagcgtgaagggccggttcaccatcagccgggacaacgccaagaagtccctgtacctccagatgaacagcctgcgggccgaggacacagccctgtactattgcgccaaggacatccagtacggcaactactactacggcatggacgtgtggggccagggaaccaccgtgaccgtgtcatctacgcgtatccagaaccctgatcctgccgtgtaccagctgcgggatagcaagagcagcgacaagagcgtgtgtctgttcaccgacttcgacagccagaccaacgtgtcccagagcaaggactccgacgtgtacatcaccgataagtgcgtgctggacatgcggagcatggacttcaagagcaactccgccgtggcctggtccaacaagtccgatttcgcctgcgccaacgccttcaacaacagcattatccccgaggacacattcttcccaagcagcgacgtgccctgcgacgtgaagctggtggaaaagagcttcgagacagacaccaacctgaacttccagaacctgagcgtgatcggcttcagaatcctgctgctgaaagtggccggctttaacctgctgatgaccctgcggctgtggtccagccgcgccaagagaagcggatctggcgtgaagcagaccctgaatttcgacctgctgaagctggctggcgacgtggaatccaacccaggcccttctagaggccatatgaccgagtacaagcccacggtgcgcctcgccacccgcgacgacgtccccagggccgtacgcaccctcgccgccgcgttcgccgactaccccgccacgcgccacaccgtcgatccggaccgccacatcgagcgggtcaccgagctgcaagaactcttcctcacgcgcgtcgggctcgacatcggcaaggtgtgggtcgcggacgacggcgccgcggtggcggtctggaccacgccggagagcgtcgaagcgggggcggtgttcgccgagatcggcccgcgcatggccgagttgagcggttcccggctggccgcgcagcaacagatggaaggcctcctggcgccgcaccggcccaaggagcccgcgtggttcctggccaccgtcggcgtctcgcccgaccaccagggcaagggtctgggcagcgccgtcgtgctccccggagtggaggcggccgagcgcgccggggtgcccgccttcctggagacctccgcgccccgcaacctccccttctacgagcggctcggcttcaccgtcaccgccgacgtcgaggtgcccgaaggaccgcgcacctggtgcatgacccgcaagcccggtgcctga

SEQ ID NO: 22177 - DNA, 3900 bp, Artificial Sequence
  Synthetic Polynucleotide
atggccttaccagtgaccgccttgctcctgccgctggccttgctgctccacgccgccaggccgctgttcaatcaagaggtgcagatccctctgaccgagagctactgtggcccctgtcctaagaactggatctgctacaagaacaactgctaccagttcttcgacgagagcaagaattggtacgagagccaggccagctgcatgagccagaatgccagcctgctgaaggtgtacagcaaagaggaccaggacctgctgaaactggtcaagagctaccactggatgggccttgtgcacatccccaccaatggctcttggcagtgggaggacggcagcattctgagccctaacctgctgaccatcatcgagatgcagaagggcgactgcgccctgtacgccagcagctttaagggctacatcgagaattgcagcaccccgaacacctacatctgtatgcagagaaccgttggcggaggcggaagtggaggcggaggatctggcggcggaggctctgacctctttaatcaagaagtccagattccactcaccgaatcctactgcggaccttgtccaaaaaattggatttgttataagaacaactgttatcaattctttgatgagtctaaaaattggtatgagtcccaggcttcctgcatgtctcagaacgcttctctgctgaaagtctactctaaagaagatcaggatctcctgaagctcgtcaagtcttatcattggatggggctcgtccacattcctaccaacggaagctggcaatgggaagatggctccatcctgtctccaaatctgctcacgattattgaaatgcagaaaggggattgtgctctctacgccagctccttcaagggatatattgagaactgtagcacgcccaatacttatatctgtatgcaacggaccgtgggtaccggcggaggcggatctggcggcggaggtagcggtggcggaggatctgaattcgacatccagatgacacagagccctagcagcctgtctgccagcgtgggagacagagtgaccatcacatgcaaggccagcgaccacatcaacaactggctggcctggtatcagcagaagcctggacaggcccctaagctgctgatctacggcgctaccacactggaaacaggcgtgcccagcagattttctggcagcggctctggcaccgactacaccctgacaatatccagcctccagcctgaggacttcgccacctactactgtcagcagagctggaacaccccttggacattcggccagggcaccaagctggaaatcaagagactcgaggacctgaagaacgtgttcccacctgaggtggccgtgttcgagcctagcaaggccgagatcgcccacacccagaaagccaccctcgtgtgcctggctaccggcttctaccccgaccatgtggaactgtcttggtgggtcaacggcaaagaggtgcacagcggcgtgtgtaccgacccccagccactgaaagaacagcccgccctgaacgacagccggtactgcctgagcagcagactgagagtgtccgccaccttctggcagaacccccggaaccacttcagatgccaggtgcagttctacggcctgagcgagaacgacgagtggacccaggacagagccaagcccgtgacccagatcgtgtctgccgaagcctggggcagagccgattgcggcatcaccagcgccagctaccaccagggcgtgctgagcgccaccatcctgtacgagatcctgctgggcaaggccaccctgtacgccgtgctggtgtctgccctggtgctgatggctatggtcaagcggaaggacagccggggaagggccaagcgatctggatctggagcaacaaacttctcactactcaaacaagcaggtgacgtggaggagaatcccgggcctactagtgccaccatggactggatttggcgcatccttttccttgtcggcgctgctaccggcgcccattccgggccccaggttcagctgcaagagtctggcggaggacttgctcaagctggcggaagcctgagactgtcttgtgccgcctctggcagaaccttcagcatgggctggtttagacaggcccctggcaaagagagagagttcgtcgccgccatcacatacagcggcggcagcccttactacgcctcttctgtcagaggccggttcaccatcagccgggacaacgccaagaacaccgtgtacctccagatgaacagcctgaagccagaggacaccgccgtgtactactgtgccgccaatccaacctacggcagcgactggaatgccgagaattggggccagggcacccaagtgacagtgtctagtggatccggcggcggaggatctggcggaggcggatctgggggcggaggctctttcgaacaagttcagcttcaacagcctggcgctgagctggtcaaacctggcgcttctgtgaagatgagctgcaaagccagcggctacgccttcagcagctactggatcaactggatgaagcagaaacccggccagggactcgaatggatcggccaaatctatcccggcgacggcgacaccaactacaacggcaagttcaagggcagagccacactgaccgccgatacctctagcagcacagcctacatgcagctgagcagcctgaccagcgaagatagcgccgtgtacttctgtgcccggtccatcacaacagtcgtgggctgcgctatggactattggggccagggaacaagcgtgaccgtgtctagtacgcgtatccagaaccctgatcctgccgtgtaccagctgcgggatagcaagagcagcgacaagagcgtgtgtctgttcaccgacttcgacagccagaccaacgtgtcccagagcaaggactccgacgtgtacatcaccgataagtgcgtgctggacatgcggagcatggacttcaagagcaactccgccgtggcctggtccaacaagtccgatttcgcctgcgccaacgccttcaacaacagcattatccccgaggacacattcttcccaagcagcgacgtgccctgcgacgtgaagctggtggaaaagagcttcgagacagacaccaacctgaacttccagaacctgagcgtgatcggcttcagaatcctgctgctgaaagtggccggctttaacctgctgatgaccctgcggctgtggtccagccgcgccaagagaagcggatctggcgtgaagcagaccctgaatttcgacctgctgaagctggctggcgacgtggaatccaacccaggcccttctagaggccatatgaccgagtacaagcccacggtgcgcctcgccacccgcgacgacgtccccagggccgtacgcaccctcgccgccgcgttcgccgactaccccgccacgcgccacaccgtcgatccggaccgccacatcgagcgggtcaccgagctgcaagaactcttcctcacgcgcgtcgggctcgacatcggcaaggtgtgggtcgcggacgacggcgccgcggtggcggtctggaccacgccggagagcgtcgaagcgggggcggtgttcgccgagatcggcccgcgcatggccgagttgagcggttcccggctggccgcgcagcaacagatggaaggcctcctggcgccgcaccggcccaaggagcccgcgtggttcctggccaccgtcggcgtctcgcccgaccaccagggcaagggtctgggcagcgccgtcgtgctccccggagtggaggcggccgagcgcgccggggtgcccgccttcctggagacctccgcgccccgcaacctccccttctacgagcggctcggcttcaccgtcaccgccgacgtcgaggtgcccgaaggaccgcgcacctggtgcatgacccgcaagcccggtgcctga

SEQ ID NO: 22178 - DNA, 3423 bp, Artificial Sequence
  Synthetic Polynucleotide
atggccttaccagtgaccgccttgctcctgccgctggccttgctgctccacgccgccaggccggaggtgcagctggttgaatctggtggcggagttgtgcagcctggcagaagcctgagactgtcttgtgccgccagcggctttagcttcagcggctatggaatgcactgggtccgacaggcccctggcaaaggacttgagtgggtcgcctacatcagctacgacggcagcaacaagtattacgccgacagcgtgaagggcagattcaccatcagccgggacaacagcaagaacaccctgtacctccagatgaacagcctgagagccgaggacaccgccgtgtactactgcgccaaagatcctgcctggggactgagactgggcgagagcagcagctacgatttcgacatctggggccagggcacaatggtcacagtttctagcggtaccggcggaggcggatctggcggcggaggtagcggtggcggaggatctgaattcgacatccagatgacacagagccctagcagcctgtctgccagcgtgggagacagagtgaccatcacatgcaaggccagcgaccacatcaacaactggctggcctggtatcagcagaagcctggacaggcccctaagctgctgatctacggcgctaccacactggaaacaggcgtgcccagcagattttctggcagcggctctggcaccgactacaccctgacaatatccagcctccagcctgaggacttcgccacctactactgtcagcagagctggaacaccccttggacattcggccagggcaccaagctggaaatcaagagactcgaggacctgaagaacgtgttcccacctgaggtggccgtgttcgagcctagcaaggccgagatcgcccacacccagaaagccaccctcgtgtgcctggctaccggcttctaccccgaccatgtggaactgtcttggtgggtcaacggcaaagaggtgcacagcggcgtgtgtaccgacccccagccactgaaagaacagcccgccctgaacgacagccggtactgcctgagcagcagactgagagtgtccgccaccttctggcagaacccccggaaccacttcagatgccaggtgcagttctacggcctgagcgagaacgacgagtggacccaggacagagccaagcccgtgacccagatcgtgtctgccgaagcctggggcagagccgattgcggcatcaccagcgccagctaccaccagggcgtgctgagcgccaccatcctgtacgagatcctgctgggcaaggccaccctgtacgccgtgctggtgtctgccctggtgctgatggctatggtcaagcggaaggacagccggggaagggccaagcgatctggatctggagcaacaaacttctcactactcaaacaagcaggtgacgtggaggagaatcccgggcctactagtgccaccatggactggatttggcgcatccttttccttgtcggcgctgctaccggcgcccattccgggccccaggttcagctgcaagagtctggcggaggacttgctcaagctggcggaagcctgagactgtcttgtgccgcctctggcagaaccttcagcatgggctggtttagacaggcccctggcaaagagagagagttcgtcgccgccatcacatacagcggcggcagcccttactacgcctcttctgtcagaggccggttcaccatcagccgggacaacgccaagaacaccgtgtacctccagatgaacagcctgaagccagaggacaccgccgtgtactactgtgccgccaatccaacctacggcagcgactggaatgccgagaattggggccagggcacccaagtgacagtgtctagtggatccggcggcggaggatctggcggaggcggatctgggggcggaggctctttcgaacaagttcagcttcaacagcctggcgctgagctggtcaaacctggcgcttctgtgaagatgagctgcaaagccagcggctacgccttcagcagctactggatcaactggatgaagcagaaacccggccagggactcgaatggatcggccaaatctatcccggcgacggcgacaccaactacaacggcaagttcaagggcagagccacactgaccgccgatacctctagcagcacagcctacatgcagctgagcagcctgaccagcgaagatagcgccgtgtacttctgtgcccggtccatcacaacagtcgtgggctgcgctatggactattggggccagggaacaagcgtgaccgtgtctagtacgcgtatccagaaccctgatcctgccgtgtaccagctgcgggatagcaagagcagcgacaagagcgtgtgtctgttcaccgacttcgacagccagaccaacgtgtcccagagcaaggactccgacgtgtacatcaccgataagtgcgtgctggacatgcggagcatggacttcaagagcaactccgccgtggcctggtccaacaagtccgatttcgcctgcgccaacgccttcaacaacagcattatccccgaggacacattcttcccaagcagcgacgtgccctgcgacgtgaagctggtggaaaagagcttcgagacagacaccaacctgaacttccagaacctgagcgtgatcggcttcagaatcctgctgctgaaagtggccggctttaacctgctgatgaccctgcggctgtggtccagccgcgccaagagaagcggatctggcgtgaagcagaccctgaatttcgacctgctgaagctggctggcgacgtggaatccaacccaggcccttctagaggccatatgaccgagtacaagcccacggtgcgcctcgccacccgcgacgacgtccccagggccgtacgcaccctcgccgccgcgttcgccgactaccccgccacgcgccacaccgtcgatccggaccgccacatcgagcgggtcaccgagctgcaagaactcttcctcacgcgcgtcgggctcgacatcggcaaggtgtgggtcgcggacgacggcgccgcggtggcggtctggaccacgccggagagcgtcgaagcgggggcggtgttcgccgagatcggcccgcgcatggccgagttgagcggttcccggctggccgcgcagcaacagatggaaggcctcctggcgccgcaccggcccaaggagcccgcgtggttcctggccaccgtcggcgtctcgcccgaccaccagggcaagggtctgggcagcgccgtcgtgctccccggagtggaggcggccgagcgcgccggggtgcccgccttcctggagacctccgcgccccgcaacctccccttctacgagcggctcggcttcaccgtcaccgccgacgtcgaggtgcccgaaggaccgcgcacctggtgcatgacccgcaagcccggtgcctga

SEQ ID NO: 22179 - DNA, 2967 bp, Artificial Sequence
  Synthetic Polynucleotide
atggccttaccagtgaccgccttgctcctgccgctggccttgctgctccacgccgccaggccggacatccagatgacacagagccctagcagcctgtctgccagcgtgggagacagagtgaccatcacatgcaaggccagcgaccacatcaacaactggctggcctggtatcagcagaagcctggacaggcccctaagctgctgatctacggcgctaccacactggaaacaggcgtgcccagcagattttctggcagcggctctggcaccgactacaccctgacaatatccagcctccagcctgaggacttcgccacctactactgtcagcagagctggaacaccccttggacattcggccagggcaccaagctggaaatcaagagactcgagatccagaaccctgatcctgccgtgtaccagctgcgggatagcaagagcagcgacaagagcgtgtgtctgttcaccgacttcgacagccagaccaacgtgtcccagagcaaggactccgacgtgtacatcaccgataagtgcgtgctggacatgcggagcatggacttcaagagcaactccgccgtggcctggtccaacaagtccgatttcgcctgcgccaacgccttcaacaacagcattatccccgaggacacattcttcccaagcagcgacgtgccctgcgacgtgaagctggtggaaaagagcttcgagacagacaccaacctgaacttccagaacctgagcgtgatcggcttcagaatcctgctgctgaaagtggccggctttaacctgctgatgaccctgcggctgtggtccagccgcgccaagagaagcggatctggcgtgaagcagaccctgaatttcgacctgctgaagctggctggcgacgtggaatccaacccaggccctactagtgccaccatggactggatttggcgcatccttttccttgtcggcgctgctaccggcgcccattccgaggttcagctgcttgagtctggcggaggactggttcaacctggcggaagcctgagactgtcttgtgccgcttccggcttcagcttcagcagctatgccctgagctgggtccgacaggctcctggcaaaggactggaatgggtgtccagcatcggcgagaatgacggcaccaccgattatgccgatgccgtgaagggcagattcaccatctctcgggacaacagcaagaacaccctgtacctccagatgaacagcctcagagtggaagataccgccgtgtactactgcgtgaaggacggcgttcactggggccagggaacactggttacagtgtctagcggatccggcggcggaggatctggcggaggcggatctgggggcggaggctctttcgaacaagttcagcttcaacagcctggcgctgagctggtcaaacctggcgcttctgtgaagatgagctgcaaagccagcggctacgccttcagcagctactggatcaactggatgaagcagaaacccggccagggactcgaatggatcggccaaatctatcccggcgacggcgacaccaactacaacggcaagttcaagggcagagccacactgaccgccgatacctctagcagcacagcctacatgcagctgagcagcctgaccagcgaagatagcgccgtgtacttctgtgcccggtccatcacaacagtcgtgggctgcgctatggactattggggccagggaacaagcgtgaccgtgtctagtacgcgtgaggacctgaagaacgtgttcccacctgaggtggccgtgttcgagcctagcaaggccgagatcgcccacacccagaaagccaccctcgtgtgcctggctaccggcttctaccccgaccatgtggaactgtcttggtgggtcaacggcaaagaggtgcacagcggcgtgtgtaccgacccccagccactgaaagaacagcccgccctgaacgacagccggtactgcctgagcagcagactgagagtgtccgccaccttctggcagaacccccggaaccacttcagatgccaggtgcagttctacggcctgagcgagaacgacgagtggacccaggacagagccaagcccgtgacccagatcgtgtctgccgaagcctggggcagagccgattgcggcatcaccagcgccagctaccaccagggcgtgctgagcgccaccatcctgtacgagatcctgctgggcaaggccaccctgtacgccgtgctggtgtctgccctggtgctgatggctatggtcaagcggaaggacagccggggaagggccaagcgatctggatctggagcaacaaacttctcactactcaaacaagcaggtgacgtggaggagaatcccgggccttctagaggccatatgaccgagtacaagcccacggtgcgcctcgccacccgcgacgacgtccccagggccgtacgcaccctcgccgccgcgttcgccgactaccccgccacgcgccacaccgtcgatccggaccgccacatcgagcgggtcaccgagctgcaagaactcttcctcacgcgcgtcgggctcgacatcggcaaggtgtgggtcgcggacgacggcgccgcggtggcggtctggaccacgccggagagcgtcgaagcgggggcggtgttcgccgagatcggcccgcgcatggccgagttgagcggttcccggctggccgcgcagcaacagatggaaggcctcctggcgccgcaccggcccaaggagcccgcgtggttcctggccaccgtcggcgtctcgcccgaccaccagggcaagggtctgggcagcgccgtcgtgctccccggagtggaggcggccgagcgcgccggggtgcccgccttcctggagacctccgcgccccgcaacctccccttctacgagcggctcggcttcaccgtcaccgccgacgtcgaggtgcccgaaggaccgcgcacctggtgcatgacccgcaagcccggtgcctga

SEQ ID NO: 22180 - DNA, 2964 bp, Artificial Sequence
  Synthetic Polynucleotide
atggccttaccagtgaccgccttgctcctgccgctggccttgctgctccacgccgccaggccggacatccagatgacacagagccctagcagcctgtctgccagcgtgggagacagagtgaccatcacatgcaaggccagcgaccacatcaacaactggctggcctggtatcagcagaagcctggacaggcccctaagctgctgatctacggcgctaccacactggaaacaggcgtgcccagcagattttctggcagcggctctggcaccgactacaccctgacaatatccagcctccagcctgaggacttcgccacctactactgtcagcagagctggaacaccccttggacattcggccagggcaccaagctggaaatcaagagactcgaggacctgaagaacgtgttcccacctgaggtggccgtgttcgagcctagcaaggccgagatcgcccacacccagaaagccaccctcgtgtgcctggctaccggcttctaccccgaccatgtggaactgtcttggtgggtcaacggcaaagaggtgcacagcggcgtgtgtaccgacccccagccactgaaagaacagcccgccctgaacgacagccggtactgcctgagcagcagactgagagtgtccgccaccttctggcagaacccccggaaccacttcagatgccaggtgcagttctacggcctgagcgagaacgacgagtggacccaggacagagccaagcccgtgacccagatcgtgtctgccgaagcctggggcagagccgattgcggcatcaccagcgccagctaccaccagggcgtgctgagcgccaccatcctgtacgagatcctgctgggcaaggccaccctgtacgccgtgctggtgtctgccctggtgctgatggctatggtcaagcggaaggacagccggggaagggccaagcgatctggatctggagcaacaaacttctcactactcaaacaagcaggtgacgtggaggagaatcccgggcctactagtgccaccatggactggatttggcgcatccttttccttgtcggcgctgctaccggcgcccattccgaggttcagctgcttgagtctggcggaggactggttcaacctggcggaagcctgagactgtcttgtgccgcttccggcttcagcttcagcagctatgccctgagctgggtccgacaggctcctggcaaaggactggaatgggtgtccagcatcggcgagaatgacggcaccaccgattatgccgatgccgtgaagggcagattcaccatctctcgggacaacagcaagaacaccctgtacctccagatgaacagcctcagagtggaagataccgccgtgtactactgcgtgaaggacggcgttcactggggccagggaacactggttacagtgtctagcggatccggcggcggaggatctggcggaggcggatctgggggcggaggctctttcgaacaagttcagcttcaacagcctggcgctgagctggtcaaacctggcgcttctgtgaagatgagctgcaaagccagcggctacgccttcagcagctactggatcaactggatgaagcagaaacccggccagggactcgaatggatcggccaaatctatcccggcgacggcgacaccaactacaacggcaagttcaagggcagagccacactgaccgccgatacctctagcagcacagcctacatgcagctgagcagcctgaccagcgaagatagcgccgtgtacttctgtgcccggtccatcacaacagtcgtgggctgcgctatggactattggggccagggaacaagcgtgaccgtgtctagtacgcgtatccagaaccctgatcctgccgtgtaccagctgcgggatagcaagagcagcgacaagagcgtgtgtctgttcaccgacttcgacagccagaccaacgtgtcccagagcaaggactccgacgtgtacatcaccgataagtgcgtgctggacatgcggagcatggacttcaagagcaactccgccgtggcctggtccaacaagtccgatttcgcctgcgccaacgccttcaacaacagcattatccccgaggacacattcttcccaagcagcgacgtgccctgcgacgtgaagctggtggaaaagagcttcgagacagacaccaacctgaacttccagaacctgagcgtgatcggcttcagaatcctgctgctgaaagtggccggctttaacctgctgatgaccctgcggctgtggtccagccgcgccaagagaagcggatctggcgtgaagcagaccctgaatttcgacctgctgaagctggctggcgacgtggaatccaacccaggcccttctagaggccatatgaccgagtacaagcccacggtgcgcctcgccacccgcgacgacgtccccagggccgtacgcaccctcgccgccgcgttcgccgactaccccgccacgcgccacaccgtcgatccggaccgccacatcgagcgggtcaccgagctgcaagaactcttcctcacgcgcgtcgggctcgacatcggcaaggtgtgggtcgcggacgacggcgccgcggtggcggtctggaccacgccggagagcgtcgaagcgggggcggtgttcgccgagatcggcccgcgcatggccgagttgagcggttcccggctggccgcgcagcaacagatggaaggcctcctggcgccgcaccggcccaaggagcccgcgtggttcctggccaccgtcggcgtctcgcccgaccaccagggcaagggtctgggcagcgccgtcgtgctccccggagtggaggcggccgagcgcgccggggtgcccgccttcctggagacctccgcgccccgcaacctccccttctacgagcggctcggcttcaccgtcaccgccgacgtcgaggtgcccgaaggaccgcgcacctggtgcatgacccgcaagcccggtgcctga

SEQ ID NO: 22181 - DNA, 2964 bp, Artificial Sequence
  Synthetic Polynucleotide
atggccttaccagtgaccgccttgctcctgccgctggccttgctgctccacgccgccaggccggacatccagatgacacagagccctagcagcctgtctgccagcgtgggagacagagtgaccatcacatgcaaggccagcgaccacatcaacaactggctggcctggtatcagcagaagcctggacaggcccctaagctgctgatctacggcgctaccacactggaaacaggcgtgcccagcagattttctggcagcggctctggcaccgactacaccctgacaatatccagcctccagcctgaggacttcgccacctactactgtcagcagagctggaacaccccttggacattcggccagggcaccaagctggaaatcaagagactcgaggacctgaagaacgtgttcccacctgaggtggccgtgttcgagcctagcgaggccgagatcagccacacccagaaagccaccctcgtgtgcctggctaccggcttctaccccgaccatgtggaactgtcttggtgggtcaacggcaaagaggtgcacagcggcgtgtgtaccgacccccagccactgaaagaacagcccgccctgaacgacagccggtactgcctgagcagcagactgagagtgtccgccaccttctggcagaacccccggaaccacttcagatgccaggtgcagttctacggcctgagcgagaacgacgagtggacccaggacagagccaagcccgtgacccagatcgtgtctgccgaagcctggggcagagccgattgcggctttaccagcgagagctaccagcagggcgtgctgagcgccaccatcctgtacgagatcctgctgggcaaggccaccctgtacgccgtgctggtgtctgccctggtgctgatggctatggtcaagcggaaggacagccggggaagggccaagcgatctggatctggagcaacaaacttctcactactcaaacaagcaggtgacgtggaggagaatcccgggcctactagtgccaccatggactggatttggcgcatccttttccttgtcggcgctgctaccggcgcccattccgaggttcagctgcttgagtctggcggaggactggttcaacctggcggaagcctgagactgtcttgtgccgcttccggcttcagcttcagcagctatgccctgagctgggtccgacaggctcctggcaaaggactggaatgggtgtccagcatcggcgagaatgacggcaccaccgattatgccgatgccgtgaagggcagattcaccatctctcgggacaacagcaagaacaccctgtacctccagatgaacagcctcagagtggaagataccgccgtgtactactgcgtgaaggacggcgttcactggggccagggaacactggttacagtgtctagcggatccggcggcggaggatctggcggaggcggatctgggggcggaggctctttcgaacaagttcagcttcaacagcctggcgctgagctggtcaaacctggcgcttctgtgaagatgagctgcaaagccagcggctacgccttcagcagctactggatcaactggatgaagcagaaacccggccagggactcgaatggatcggccaaatctatcccggcgacggcgacaccaactacaacggcaagttcaagggcagagccacactgaccgccgatacctctagcagcacagcctacatgcagctgagcagcctgaccagcgaagatagcgccgtgtacttctgtgcccggtccatcacaacagtcgtgggctgcgctatggactattggggccagggaacaagcgtgaccgtgtctagtacgcgtatccagaaccctgatcctgccgtgtaccagctgcgggatagcaagagcagcgacaagagcgtgtgtctgttcaccgacttcgacagccagaccaacgtgtcccagagcaaggactccgacgtgtacatcaccgataagtgcgtgctggacatgcggagcatggacttcaagagcaactccgccgtggcctggtccaacaagtccgatttcgcctgcgccaacgccttcaacaacagcattatccccgaggacacattcttcccaagccccgagagcagctgcgacgtgaagctggtggaaaagagcttcgagacagacaccaacctgaacttccagaacctgagcgtgatcggcttcagaatcctgctgctgaaagtggccggctttaacctgctgatgaccctgcggctgtggtccagccgcgccaagagaagcggatctggcgtgaagcagaccctgaatttcgacctgctgaagctggctggcgacgtggaatccaacccaggcccttctagaggccatatgaccgagtacaagcccacggtgcgcctcgccacccgcgacgacgtccccagggccgtacgcaccctcgccgccgcgttcgccgactaccccgccacgcgccacaccgtcgatccggaccgccacatcgagcgggtcaccgagctgcaagaactcttcctcacgcgcgtcgggctcgacatcggcaaggtgtgggtcgcggacgacggcgccgcggtggcggtctggaccacgccggagagcgtcgaagcgggggcggtgttcgccgagatcggcccgcgcatggccgagttgagcggttcccggctggccgcgcagcaacagatggaaggcctcctggcgccgcaccggcccaaggagcccgcgtggttcctggccaccgtcggcgtctcgcccgaccaccagggcaagggtctgggcagcgccgtcgtgctccccggagtggaggcggccgagcgcgccggggtgcccgccttcctggagacctccgcgccccgcaacctccccttctacgagcggctcggcttcaccgtcaccgccgacgtcgaggtgcccgaaggaccgcgcacctggtgcatgacccgcaagcccggtgcctga

SEQ ID NO: 22182 - DNA, 3012 bp, Artificial Sequence
  Synthetic Polynucleotide
atggccttaccagtgaccgccttgctcctgccgctggccttgctgctccacgccgccaggccggcatgcgaggtgcagctggttgaatctggtggcggagttgtgcagcctggcagaagcctgagactgtcttgtgccgccagcggctttagcttcagcggctatggaatgcactgggtccgacaggcccctggcaaaggacttgagtgggtcgcctacatcagctacgacggcagcaacaagtattacgccgacagcgtgaagggcagattcaccatcagccgggacaacagcaagaacaccctgtacctccagatgaacagcctgagagccgaggacaccgccgtgtactactgcgccaaagatcctgcctggggactgagactgggcgagagcagcagctacgatttcgactactggggccagggcacaatggtcacagtttctagcggtaccggcggaggcggatctggcggcggaggtagcggtggcggaggatctgaattcgacatccagatgacacagagccctagcagcctgtctgccagcgtgggagacagagtgaccatcacatgcaaggccagcgaccacatcaacaactggctggcctggtatcagcagaagcctggacaggcccctaagctgctgatctacggcgctaccacactggaaacaggcgtgcccagcagattttctggcagcggctctggcaccgactacaccctgacaatatccagcctccagcctgaggacttcgccacctactactgtcagcagagctggaacaccccttggacattcggccagggcaccaagctggaaatcaagagactcgaggacctgaagaacgtgttcccacctgaggtggccgtgttcgagcctagcgaggccgagatcagccacacccagaaagccaccctcgtgtgcctggctaccggcttctaccccgaccatgtggaactgtcttggtgggtcaacggcaaagaggtgcacagcggcgtgtgtaccgacccccagccactgaaagaacagcccgccctgaacgacagccggtactgcctgagcagcagactgagagtgtccgccaccttctggcagaacccccggaaccacttcagatgccaggtgcagttctacggcctgagcgagaacgacgagtggacccaggacagagccaagcccgtgacccagatcgtgtctgccgaagcctggggcagagccgattgcggctttaccagcgagagctaccagcagggcgtgctgagcgccaccatcctgtacgagatcctgctgggcaaggccaccctgtacgccgtgctggtgtctgccctggtgctgatggctatggtcaagcggaaggacagccggggaagggccaagcgatctggatctggagcaacaaacttctcactactcaaacaagcaggtgacgtggaggagaatcccgggcctactagtatggactggatttggcgcatccttttccttgtcggcgctgctaccggcgcgcattccttcgaacaagttcagcttcaacagcctggcgctgagctggtcaaacctggcgcttctgtgaagatgagctgcaaagccagcggctacgccttcagcagctactggatcaactggatgaagcagaaacccggccagggactcgaatggatcggccaaatctatcccggcgacggcgacaccaactacaacggcaagttcaagggcagagccacactgaccgccgatacctctagcagcacagcctacatgcagctgagcagcctgaccagcgaagatagcgccgtgtacttctgtgcccggtccatcacaacagtcgtgggctgcgctatggactattggggccagggaacaagcgtgaccgtgtctagtacgcgtatccagaaccctgatcctgccgtgtaccagctgcgggatagcaagagcagcgacaagagcgtgtgtctgttcaccgacttcgacagccagaccaacgtgtcccagagcaaggactccgacgtgtacatcaccgataagtgcgtgctggacatgcggagcatggacttcaagagcaactccgccgtggcctggtccaacaagtccgatttcgcctgcgccaacgccttcaacaacagcattatccccgaggacacattcttcccaagccccgagagcagctgcgacgtgaagctggtggaaaagagcttcgagacagacaccaacctgaacttccagaacctgagcgtgatcggcttcagaatcctgctgctgaaagtggccggctttaacctgctgatgaccctgcggctgtggtccagccgcgccaagagaagcggatctggcgtgaagcagaccctgaatttcgacctgctgaagctggctggcgacgtggaatccaacccaggcccttctagaggccatatgaccgagtacaagcccacggtgcgcctcgccacccgcgacgacgtccccagggccgtacgcaccctcgccgccgcgttcgccgactaccccgccacgcgccacaccgtcgatccggaccgccacatcgagcgggtcaccgagctgcaagaactcttcctcacgcgcgtcgggctcgacatcggcaaggtgtgggtcgcggacgacggcgccgcggtggcggtctggaccacgccggagagcgtcgaagcgggggcggtgttcgccgagatcggcccgcgcatggccgagttgagcggttcccggctggccgcgcagcaacagatggaaggcctcctggcgccgcaccggcccaaggagcccgcgtggttcctggccaccgtcggcgtctcgcccgaccaccagggcaagggtctgggcagcgccgtcgtgctccccggagtggaggcggccgagcgcgccggggtgcccgccttcctggagacctccgcgccccgcaacctccccttctacgagcggctcggcttcaccgtcaccgccgacgtcgaggtgcccgaaggaccgcgcacctggtgcatgacccgcaagcccggtgcctga

SEQ ID NO: 22183 - DNA, 3009 bp, Artificial Sequence
  Synthetic Polynucleotide
atggccttaccagtgaccgccttgctcctgccgctggccttgctgctccacgccgccaggccggcatgccaggttcagctgcaagaatctggcgctggcctgctgaagcctagcgagacactgtctctgacctgtgccgtgtacggcggcagctttagcgcctacaactggaactggatcagacagcctcctggcaaaggactggaatggattggcgagatcaaccacagaggcgacaccgcctacaatcccagcctgaagtccagagtgaccatcagcgtggacaccagcaagaaccagttcagcctgaacctgaccagcgtgacagccgccgatacagccgtgtactattgtgccgccagaggctacagctacggatggcctcctggatatatcagcgacgccttcgacatctggggccagggaacacaagtgaccgtgtctagtggtaccggcggaggcggatctggcggcggaggtagcggtggcggaggatctgaattcgacatccagatgacacagagccctagcagcctgtctgccagcgtgggagacagagtgaccatcacatgcaaggccagcgaccacatcaacaactggctggcctggtatcagcagaagcctggacaggcccctaagctgctgatctacggcgctaccacactggaaacaggcgtgcccagcagattttctggcagcggctctggcaccgactacaccctgacaatatccagcctccagcctgaggacttcgccacctactactgtcagcagagctggaacaccccttggacattcggccagggcaccaagctggaaatcaagagactcgaggacctgaagaacgtgttcccacctgaggtggccgtgttcgagcctagcgaggccgagatcagccacacccagaaagccaccctcgtgtgcctggctaccggcttctaccccgaccatgtggaactgtcttggtgggtcaacggcaaagaggtgcacagcggcgtgtgtaccgacccccagccactgaaagaacagcccgccctgaacgacagccggtactgcctgagcagcagactgagagtgtccgccaccttctggcagaacccccggaaccacttcagatgccaggtgcagttctacggcctgagcgagaacgacgagtggacccaggacagagccaagcccgtgacccagatcgtgtctgccgaagcctggggcagagccgattgcggctttaccagcgagagctaccagcagggcgtgctgagcgccaccatcctgtacgagatcctgctgggcaaggccaccctgtacgccgtgctggtgtctgccctggtgctgatggctatggtcaagcggaaggacagccggggaagggccaagcgatctggatctggagcaacaaacttctcactactcaaacaagcaggtgacgtggaggagaatcccgggcctactagtatggactggatttggcgcatccttttccttgtcggcgctgctaccggcgcgcattccttcgaacaagttcagcttcaacagcctggcgctgagctggtcaaacctggcgcttctgtgaagatgagctgcaaagccagcggctacgccttcagcagctactggatcaactggatgaagcagaaacccggccagggactcgaatggatcggccaaatctatcccggcgacggcgacaccaactacaacggcaagttcaagggcagagccacactgaccgccgatacctctagcagcacagcctacatgcagctgagcagcctgaccagcgaagatagcgccgtgtacttctgtgcccggtccatcacaacagtcgtgggctgcgctatggactattggggccagggaacaagcgtgaccgtgtctagtacgcgtatccagaaccctgatcctgccgtgtaccagctgcgggatagcaagagcagcgacaagagcgtgtgtctgttcaccgacttcgacagccagaccaacgtgtcccagagcaaggactccgacgtgtacatcaccgataagtgcgtgctggacatgcggagcatggacttcaagagcaactccgccgtggcctggtccaacaagtccgatttcgcctgcgccaacgccttcaacaacagcattatccccgaggacacattcttcccaagccccgagagcagctgcgacgtgaagctggtggaaaagagcttcgagacagacaccaacctgaacttccagaacctgagcgtgatcggcttcagaatcctgctgctgaaagtggccggctttaacctgctgatgaccctgcggctgtggtccagccgcgccaagagaagcggatctggcgtgaagcagaccctgaatttcgacctgctgaagctggctggcgacgtggaatccaacccaggcccttctagaggccatatgaccgagtacaagcccacggtgcgcctcgccacccgcgacgacgtccccagggccgtacgcaccctcgccgccgcgttcgccgactaccccgccacgcgccacaccgtcgatccggaccgccacatcgagcgggtcaccgagctgcaagaactcttcctcacgcgcgtcgggctcgacatcggcaaggtgtgggtcgcggacgacggcgccgcggtggcggtctggaccacgccggagagcgtcgaagcgggggcggtgttcgccgagatcggcccgcgcatggccgagttgagcggttcccggctggccgcgcagcaacagatggaaggcctcctggcgccgcaccggcccaaggagcccgcgtggttcctggccaccgtcggcgtctcgcccgaccaccagggcaagggtctgggcagcgccgtcgtgctccccggagtggaggcggccgagcgcgccggggtgcccgccttcctggagacctccgcgccccgcaacctccccttctacgagcggctcggcttcaccgtcaccgccgacgtcgaggtgcccgaaggaccgcgcacctggtgcatgacccgcaagcccggtgcctga

SEQ ID NO: 22184 - DNA, 3000 bp, Artificial Sequence
  Synthetic Polynucleotide
atggccttaccagtgaccgccttgctcctgccgctggccttgctgctccacgccgccaggccggcatgcgaggtgcagctggttgaatctggtggcggagttgtgcagcctggcagaagcctgagactgtcttgtgccgcctctggcttccctctgatctcctacggaatgcactgggtccgacaggcccctggcaaaggacttgagtgggtcgccttcatgacctacgacggcagcaatcggtactacgccgacagcgtgaagggcagattcaccatcagccgggacaacagcaagaacaccctgtacctccagatgaacagcctgcgcgacgaggacacagccctgtactactgcgccagagacagaatcgttggcggcagagtgcccgacagctttgactactggggccagggcacaatggtcaccgtgtctagtggtaccggcggaggcggatctggcggcggaggtagcggtggcggaggatctgaattcgacatccagatgacacagagccctagcagcctgtctgccagcgtgggagacagagtgaccatcacatgcaaggccagcgaccacatcaacaactggctggcctggtatcagcagaagcctggacaggcccctaagctgctgatctacggcgctaccacactggaaacaggcgtgcccagcagattttctggcagcggctctggcaccgactacaccctgacaatatccagcctccagcctgaggacttcgccacctactactgtcagcagagctggaacaccccttggacattcggccagggcaccaagctggaaatcaagagactcgaggacctgaagaacgtgttcccacctgaggtggccgtgttcgagcctagcgaggccgagatcagccacacccagaaagccaccctcgtgtgcctggctaccggcttctaccccgaccatgtggaactgtcttggtgggtcaacggcaaagaggtgcacagcggcgtgtgtaccgacccccagccactgaaagaacagcccgccctgaacgacagccggtactgcctgagcagcagactgagagtgtccgccaccttctggcagaacccccggaaccacttcagatgccaggtgcagttctacggcctgagcgagaacgacgagtggacccaggacagagccaagcccgtgacccagatcgtgtctgccgaagcctggggcagagccgattgcggctttaccagcgagagctaccagcagggcgtgctgagcgccaccatcctgtacgagatcctgctgggcaaggccaccctgtacgccgtgctggtgtctgccctggtgctgatggctatggtcaagcggaaggacagccggggaagggccaagcgatctggatctggagcaacaaacttctcactactcaaacaagcaggtgacgtggaggagaatcccgggcctactagtatggactggatttggcgcatccttttccttgtcggcgctgctaccggcgcgcattccttcgaacaagttcagcttcaacagcctggcgctgagctggtcaaacctggcgcttctgtgaagatgagctgcaaagccagcggctacgccttcagcagctactggatcaactggatgaagcagaaacccggccagggactcgaatggatcggccaaatctatcccggcgacggcgacaccaactacaacggcaagttcaagggcagagccacactgaccgccgatacctctagcagcacagcctacatgcagctgagcagcctgaccagcgaagatagcgccgtgtacttctgtgcccggtccatcacaacagtcgtgggctgcgctatggactattggggccagggaacaagcgtgaccgtgtctagtacgcgtatccagaaccctgatcctgccgtgtaccagctgcgggatagcaagagcagcgacaagagcgtgtgtctgttcaccgacttcgacagccagaccaacgtgtcccagagcaaggactccgacgtgtacatcaccgataagtgcgtgctggacatgcggagcatggacttcaagagcaactccgccgtggcctggtccaacaagtccgatttcgcctgcgccaacgccttcaacaacagcattatccccgaggacacattcttcccaagccccgagagcagctgcgacgtgaagctggtggaaaagagcttcgagacagacaccaacctgaacttccagaacctgagcgtgatcggcttcagaatcctgctgctgaaagtggccggctttaacctgctgatgaccctgcggctgtggtccagccgcgccaagagaagcggatctggcgtgaagcagaccctgaatttcgacctgctgaagctggctggcgacgtggaatccaacccaggcccttctagaggccatatgaccgagtacaagcccacggtgcgcctcgccacccgcgacgacgtccccagggccgtacgcaccctcgccgccgcgttcgccgactaccccgccacgcgccacaccgtcgatccggaccgccacatcgagcgggtcaccgagctgcaagaactcttcctcacgcgcgtcgggctcgacatcggcaaggtgtgggtcgcggacgacggcgccgcggtggcggtctggaccacgccggagagcgtcgaagcgggggcggtgttcgccgagatcggcccgcgcatggccgagttgagcggttcccggctggccgcgcagcaacagatggaaggcctcctggcgccgcaccggcccaaggagcccgcgtggttcctggccaccgtcggcgtctcgcccgaccaccagggcaagggtctgggcagcgccgtcgtgctccccggagtggaggcggccgagcgcgccggggtgcccgccttcctggagacctccgcgccccgcaacctccccttctacgagcggctcggcttcaccgtcaccgccgacgtcgaggtgcccgaaggaccgcgcacctggtgcatgacccgcaagcccggtgcctga

SEQ ID NO: 22185 - DNA, 2970 bp, Artificial Sequence
  Synthetic Polynucleotide
atggccttaccagtgaccgccttgctcctgccgctggccttgctgctccacgccgccaggccggacatccagatgacacagagccctagcagcctgtctgccagcgtgggagacagagtgaccatcacatgcaaggccagcgaccacatcaacaactggctggcctggtatcagcagaagcctggacaggcccctaagctgctgatctacggcgctaccacactggaaacaggcgtgcccagcagattttctggcagcggctctggcaccgactacaccctgacaatatccagcctccagcctgaggacttcgccacctactactgtcagcagagctggaacaccccttggacattcggccagggcaccaagctggaaatcaagagactcgaggacctgaagaacgtgttcccacctgaggtggccgtgttcgagcctagcgaggccgagatcagccacacccagaaagccaccctcgtgtgcctggctaccggcttctaccccgaccatgtggaactgtcttggtgggtcaacggcaaagaggtgcacagcggcgtgtgtaccgacccccagccactgaaagaacagcccgccctgaacgacagccggtactgcctgagcagcagactgagagtgtccgccaccttctggcagaacccccggaaccacttcagatgccaggtgcagttctacggcctgagcgagaacgacgagtggacccaggacagagccaagcccgtgacccagatcgtgtctgccgaagcctggggcagagccgattgcggctttaccagcgagagctaccagcagggcgtgctgagcgccaccatcctgtacgagatcctgctgggcaaggccaccctgtacgccgtgctggtgtctgccctggtgctgatggctatggtcaagcggaaggacagccggggaagggccaagcgatctggatctggagcaacaaacttctcactactcaaacaagcaggtgacgtggaggagaatcccgggcctactagtgccaccatggactggatttggcgcatccttttccttgtcggcgctgctaccggcgcccattccgggcccgaagttcagctgctggaatctggcggaggactcgttcaacctggcggctctctgagactgagctgtgccgcttctggcttcagcttctctagctacgccctgagctgggttcgacaagctcccggaaagggccttgaatgggtgtccagcatcggcgagaatgacggcaccacagactatgccgatgccgtgaaaggccggtttaccatcagcagagacaattccaagaacacgctctatctgcaaatgaactccctgcgcgtggaagatacagccgtgtattattgcgtgaaggacggcatccactggggacagggaaccctggttacagtgtctagcggatccggcggcggaggatctggcggaggcggatctgggggcggaggctctttcgaacaagttcagcttcaacagcctggcgctgagctggtcaaacctggcgcttctgtgaagatgagctgcaaagccagcggctacgccttcagcagctactggatcaactggatgaagcagaaacccggccagggactcgaatggatcggccaaatctatcccggcgacggcgacaccaactacaacggcaagttcaagggcagagccacactgaccgccgatacctctagcagcacagcctacatgcagctgagcagcctgaccagcgaagatagcgccgtgtacttctgtgcccggtccatcacaacagtcgtgggctgcgctatggactattggggccagggaacaagcgtgaccgtgtctagtacgcgtatccagaaccctgatcctgccgtgtaccagctgcgggatagcaagagcagcgacaagagcgtgtgtctgttcaccgacttcgacagccagaccaacgtgtcccagagcaaggactccgacgtgtacatcaccgataagtgcgtgctggacatgcggagcatggacttcaagagcaactccgccgtggcctggtccaacaagtccgatttcgcctgcgccaacgccttcaacaacagcattatccccgaggacacattcttcccaagccccgagagcagctgcgacgtgaagctggtggaaaagagcttcgagacagacaccaacctgaacttccagaacctgagcgtgatcggcttcagaatcctgctgctgaaagtggccggctttaacctgctgatgaccctgcggctgtggtccagccgcgccaagagaagcggatctggcgtgaagcagaccctgaatttcgacctgctgaagctggctggcgacgtggaatccaacccaggcccttctagaggccatatgaccgagtacaagcccacggtgcgcctcgccacccgcgacgacgtccccagggccgtacgcaccctcgccgccgcgttcgccgactaccccgccacgcgccacaccgtcgatccggaccgccacatcgagcgggtcaccgagctgcaagaactcttcctcacgcgcgtcgggctcgacatcggcaaggtgtgggtcgcggacgacggcgccgcggtggcggtctggaccacgccggagagcgtcgaagcgggggcggtgttcgccgagatcggcccgcgcatggccgagttgagcggttcccggctggccgcgcagcaacagatggaaggcctcctggcgccgcaccggcccaaggagcccgcgtggttcctggccaccgtcggcgtctcgcccgaccaccagggcaagggtctgggcagcgccgtcgtgctccccggagtggaggcggccgagcgcgccggggtgcccgccttcctggagacctccgcgccccgcaacctccccttctacgagcggctcggcttcaccgtcaccgccgacgtcgaggtgcccgaaggaccgcgcacctggtgcatgacccgcaagcccggtgcctga

SEQ ID NO: 22186 - DNA, 2970 bp, Artificial Sequence
  Synthetic Polynucleotide
atggccttaccagtgaccgccttgctcctgccgctggccttgctgctccacgccgccaggccggacatccagatgacacagagccctagcagcctgtctgccagcgtgggagacagagtgaccatcacatgcaaggccagcgaccacatcaacaactggctggcctggtatcagcagaagcctggacaggcccctaagctgctgatctacggcgctaccacactggaaacaggcgtgcccagcagattttctggcagcggctctggcaccgactacaccctgacaatatccagcctccagcctgaggacttcgccacctactactgtcagcagagctggaacaccccttggacattcggccagggcaccaagctggaaatcaagagactcgaggacctgaagaacgtgttcccacctgaggtggccgtgttcgagcctagcgaggccgagatcagccacacccagaaagccaccctcgtgtgcctggctaccggcttctaccccgaccatgtggaactgtcttggtgggtcaacggcaaagaggtgcacagcggcgtgtgtaccgacccccagccactgaaagaacagcccgccctgaacgacagccggtactgcctgagcagcagactgagagtgtccgccaccttctggcagaacccccggaaccacttcagatgccaggtgcagttctacggcctgagcgagaacgacgagtggacccaggacagagccaagcccgtgacccagatcgtgtctgccgaagcctggggcagagccgattgcggctttaccagcgagagctaccagcagggcgtgctgagcgccaccatcctgtacgagatcctgctgggcaaggccaccctgtacgccgtgctggtgtctgccctggtgctgatggctatggtcaagcggaaggacagccggggaagggccaagcgatctggatctggagcaacaaacttctcactactcaaacaagcaggtgacgtggaggagaatcccgggcctactagtgccaccatggactggatttggcgcatccttttccttgtcggcgctgctaccggcgcccattccgggcccgaagttcagctgctggaatctggcggaggactcgttcaacctggcggctctctgagactgagctgtgccgcttctggcttcagcttctctggctacgccctgagctgggttcgacaagctcccggaaagggccttgaatgggtgtccagcatcggcgagaatgacggcaccacagactatgccgatgccgtgaaaggccggtttaccatcagcagagacaattccaagaacacgctctatctgcaaatgaactccctgcgcgtggaagatacagccgtgtattattgcgtgaaggacggcgtgcactggggacagggaaccctggttacagtgtctagcggatccggcggcggaggatctggcggaggcggatctgggggcggaggctctttcgaacaagttcagcttcaacagcctggcgctgagctggtcaaacctggcgcttctgtgaagatgagctgcaaagccagcggctacgccttcagcagctactggatcaactggatgaagcagaaacccggccagggactcgaatggatcggccaaatctatcccggcgacggcgacaccaactacaacggcaagttcaagggcagagccacactgaccgccgatacctctagcagcacagcctacatgcagctgagcagcctgaccagcgaagatagcgccgtgtacttctgtgcccggtccatcacaacagtcgtgggctgcgctatggactattggggccagggaacaagcgtgaccgtgtctagtacgcgtatccagaaccctgatcctgccgtgtaccagctgcgggatagcaagagcagcgacaagagcgtgtgtctgttcaccgacttcgacagccagaccaacgtgtcccagagcaaggactccgacgtgtacatcaccgataagtgcgtgctggacatgcggagcatggacttcaagagcaactccgccgtggcctggtccaacaagtccgatttcgcctgcgccaacgccttcaacaacagcattatccccgaggacacattcttcccaagccccgagagcagctgcgacgtgaagctggtggaaaagagcttcgagacagacaccaacctgaacttccagaacctgagcgtgatcggcttcagaatcctgctgctgaaagtggccggctttaacctgctgatgaccctgcggctgtggtccagccgcgccaagagaagcggatctggcgtgaagcagaccctgaatttcgacctgctgaagctggctggcgacgtggaatccaacccaggcccttctagaggccatatgaccgagtacaagcccacggtgcgcctcgccacccgcgacgacgtccccagggccgtacgcaccctcgccgccgcgttcgccgactaccccgccacgcgccacaccgtcgatccggaccgccacatcgagcgggtcaccgagctgcaagaactcttcctcacgcgcgtcgggctcgacatcggcaaggtgtgggtcgcggacgacggcgccgcggtggcggtctggaccacgccggagagcgtcgaagcgggggcggtgttcgccgagatcggcccgcgcatggccgagttgagcggttcccggctggccgcgcagcaacagatggaaggcctcctggcgccgcaccggcccaaggagcccgcgtggttcctggccaccgtcggcgtctcgcccgaccaccagggcaagggtctgggcagcgccgtcgtgctccccggagtggaggcggccgagcgcgccggggtgcccgccttcctggagacctccgcgccccgcaacctccccttctacgagcggctcggcttcaccgtcaccgccgacgtcgaggtgcccgaaggaccgcgcacctggtgcatgacccgcaagcccggtgcctga

SEQ ID NO: 22187 - DNA, 2976 bp, Artificial Sequence
  Synthetic Polynucleotide
atggccttaccagtgaccgccttgctcctgccgctggccttgctgctccacgccgccaggccggacatccagatgacacagagccctagcagcctgtctgccagcgtgggagacagagtgaccatcacatgcaaggccagcgaccacatcaacaactggctggcctggtatcagcagaagcctggacaggcccctaagctgctgatctacggcgctaccacactggaaacaggcgtgcccagcagattttctggcagcggctctggcaccgactacaccctgacaatatccagcctccagcctgaggacttcgccacctactactgtcagcagagctggaacaccccttggacattcggccagggcaccaagctggaaatcaagagactcgagggacagcctaaggccaatcctaccgtgacactgttccctccaagcagcgaagaactccaggccaacaaggccacacttgtgtgcctgatctccgacttctaccctggggctgtgacagtggcttggaaggccgatggatctcctgtgaaagccggcgtggaaaccaccaagccatccaagcagagcaacaacaaatacgccgccagctcctacctgagcctgacacctgagcagtggaagtcccacagatcctacagctgccaagtgacccacgaaggcagcaccgtggaaaagacagtggcccctacagagtgcagcggcagagccgattgcggctttaccagcgagagctaccagcagggcgtgctgagcgccaccatcctgtacgagatcctgctgggcaaggccaccctgtacgccgtgctggtgtctgccctggtgctgatggctatggtcaagcggaaggacagccggggaagggccaagcgatctggatctggagcaacaaacttctcactactcaaacaagcaggtgacgtggaggagaatcccgggcctactagtgccaccatggactggatttggcgcatccttttccttgtcggcgctgctaccggcgcccattccgaggttcagctgcttgagtctggcggaggactggttcaacctggcggaagcctgagactgtcttgtgccgcttccggcttcagcttcagcagctatgccctgagctgggtccgacaggctcctggcaaaggactggaatgggtgtccagcatcggcgagaatgacggcaccaccgattatgccgatgccgtgaagggcagattcaccatctctcgggacaacagcaagaacaccctgtacctccagatgaacagcctcagagtggaagataccgccgtgtactactgcgtgaaggacggcgttcactggggccagggaacactggttacagtgtctagcggatccggcggcggaggatctggcggaggcggatctgggggcggaggctctttcgaacaagttcagcttcaacagcctggcgctgagctggtcaaacctggcgcttctgtgaagatgagctgcaaagccagcggctacgccttcagcagctactggatcaactggatgaagcagaaacccggccagggactcgaatggatcggccaaatctatcccggcgacggcgacaccaactacaacggcaagttcaagggcagagccacactgaccgccgatacctctagcagcacagcctacatgcagctgagcagcctgaccagcgaagatagcgccgtgtacttctgtgcccggtccatcacaacagtcgtgggctgcgctatggactattggggccagggaacaagcgtgaccgtgtctagtacgcgtgcctctacaaagggaccctccgtgtttcctctggctcccagcagcaagtctacaagcggaggaacagccgctctgggctgcctggtcaaggattactttcccgagcctgtgaccgtgtcctggaatagcggagcactgacaagcggcgtgcacacctttccagccgtgctgcaaagcagcggcctgtactctctgagcagcgtggtcacagtgcctagctctagcctgggcacccagacctacatctgcaatgtgaaccacaagcctagcaacaccaaggtggacaagagagtggaacccaagagctgtatccccgaggacacattcttcccaagccccgagagcagctgcgacgtgaagctggtggaaaagagcttcgagacagacaccaacctgaacttccagaacctgagcgtgatcggcttcagaatcctgctgctgaaagtggccggctttaacctgctgatgaccctgcggctgtggtccagccgcgccaagagaagcggatctggcgtgaagcagaccctgaatttcgacctgctgaagctggctggcgacgtggaatccaacccaggcccttctagaggccatatgaccgagtacaagcccacggtgcgcctcgccacccgcgacgacgtccccagggccgtacgcaccctcgccgccgcgttcgccgactaccccgccacgcgccacaccgtcgatccggaccgccacatcgagcgggtcaccgagctgcaagaactcttcctcacgcgcgtcgggctcgacatcggcaaggtgtgggtcgcggacgacggcgccgcggtggcggtctggaccacgccggagagcgtcgaagcgggggcggtgttcgccgagatcggcccgcgcatggccgagttgagcggttcccggctggccgcgcagcaacagatggaaggcctcctggcgccgcaccggcccaaggagcccgcgtggttcctggccaccgtcggcgtctcgcccgaccaccagggcaagggtctgggcagcgccgtcgtgctccccggagtggaggcggccgagcgcgccggggtgcccgccttcctggagacctccgcgccccgcaacctccccttctacgagcggctcggcttcaccgtcaccgccgacgtcgaggtgcccgaaggaccgcgcacctggtgcatgacccgcaagcccggtgcctga

SEQ ID NO: 22188 - DNA, 2949 bp, Artificial Sequence
  Synthetic Polynucleotide
atggccttaccagtgaccgccttgctcctgccgctggccttgctgctccacgccgccaggccggacatccagatgacacagagccctagcagcctgtctgccagcgtgggagacagagtgaccatcacatgcaaggccagcgaccacatcaacaactggctggcctggtatcagcagaagcctggacaggcccctaagctgctgatctacggcgctaccacactggaaacaggcgtgcccagcagattttctggcagcggctctggcaccgactacaccctgacaatatccagcctccagcctgaggacttcgccacctactactgtcagcagagctggaacaccccttggacattcggccagggcaccaagctggaaatcaagagactcgaggccgacgtgtcccccaagcctaccatcttcctgccctctatcgccgagacaaagctccagaaggccggcacctacctgtgcctgctggaaaagttcttcccagatgtgattaagatccactggcaggaaaagaagtccaacaccatcctgggcagccaggaaggcaacaccatgaagaccaacgacacctacatgaagttcagctggctgaccgtgcccgagaagtccctggacaaagaacacagatgcatcgtgcggcacgaaaacaacaagaacggcgtggaccaggaaatcatcttcccacccatcaagaccgatgtgattacaatggaccccaaggacaactgctccaaggacgccaacgataccctgctgctccagctgaccaacaccagcgcctactacatgtacttgttgctgctgctgaagtccgtggtgtacttcgccatcatcacatgctgcctgctgcggagaaccgccttctgctgcaacggcgagaagtctagggccaagcgatctggatctggagcaacaaacttctcactactcaaacaagcaggtgacgtggaggagaatcccgggcctactagtaccatggactggatttggcgcatccttttccttgtcggcgctgctaccggcgcccattccgaggttcagctgcttgagtctggcggaggactggttcaacctggcggaagcctgagactgtcttgtgccgcttccggcttcagcttcagcagctatgccctgagctgggtccgacaggctcctggcaaaggactggaatgggtgtccagcatcggcgagaatgacggcaccaccgattatgccgatgccgtgaagggcagattcaccatctctcgggacaacagcaagaacaccctgtacctccagatgaacagcctcagagtggaagataccgccgtgtactactgcgtgaaggacggcgttcactggggccagggaacactggttacagtgtctagcggatccggcggaggcggaagtggaggcggaggatctttcgaacaagttcagcttcaacagcctggcgctgagctggtcaaacctggcgcttctgtgaagatgagctgcaaagccagcggctacgccttcagcagctactggatcaactggatgaagcagaaacccggccagggactcgaatggatcggccaaatctatcccggcgacggcgacaccaactacaacggcaagttcaagggcagagccacactgaccgccgatacctctagcagcacagcctacatgcagctgagcagcctgaccagcgaagatagcgccgtgtacttctgtgcccggtccatcacaacagtcgtgggctgcgctatggactattggggccagggaacaagcgtgaccgtgtctagtacgcgtcctcacaccaagcccagcgtgttcgtgatgaagaacggcaccaacgtggcctgcctcgtgaaagagttctaccccaaggacatcaggatcaacctggtgtccagcaagaagatcaccgagttcgaccccgccatcgtgatctcccccagcggcaagtacaacgccgtgaagctggggaagtacgaggacagcaacagcgtgacctgctccgtgcagcacgacaacaagaccgtgcacagcaccgactttgaagtgaaaaccgactccaccgaccacgtgaagcccaaagagacagagaacaccaagcagcccagcaagagctgccacaagcccaaggccatcgtgcacaccgagaaagtgaacatgatgagcctgaccgtgctgggcctgcggatgctgttcgccaaaaccgtggccgtgaacttcctgctgaccgccaagctgttcttcctccgcgccaagagaagcggatctggcgtgaagcagaccctgaatttcgacctgctgaagctggctggcgacgtggaatccaacccaggcccttctagaggccatatgaccgagtacaagcccacggtgcgcctcgccacccgcgacgacgtccccagggccgtacgcaccctcgccgccgcgttcgccgactaccccgccacgcgccacaccgtcgatccggaccgccacatcgagcgggtcaccgagctgcaagaactcttcctcacgcgcgtcgggctcgacatcggcaaggtgtgggtcgcggacgacggcgccgcggtggcggtctggaccacgccggagagcgtcgaagcgggggcggtgttcgccgagatcggcccgcgcatggccgagttgagcggttcccggctggccgcgcagcaacagatggaaggcctcctggcgccgcaccggcccaaggagcccgcgtggttcctggccaccgtcggcgtctcgcccgaccaccagggcaagggtctgggcagcgccgtcgtgctccccggagtggaggcggccgagcgcgccggggtgcccgccttcctggagacctccgcgccccgcaacctccccttctacgagcggctcggcttcaccgtcaccgccgacgtcgaggtgcccgaaggaccgcgcacctggtgcatgacccgcaagcccggtgcctga

SEQ ID NO: 22189 - DNA, 3018 bp, Artificial Sequence
  Synthetic Polynucleotide
atggccttaccagtgaccgccttgctcctgccgctggccttgctgctccacgccgccaggccggacatccagatgacacagagccctagcagcctgtctgccagcgtgggagacagagtgaccatcacatgcaaggccagcgaccacatcaacaactggctggcctggtatcagcagaagcctggacaggcccctaagctgctgatctacggcgctaccacactggaaacaggcgtgcccagcagattttctggcagcggctctggcaccgactacaccctgacaatatccagcctccagcctgaggacttcgccacctactactgtcagcagagctggaacaccccttggacattcggccagggcaccaagctggaaatcaagagactcgaggacctgaagaacgtgttcccacctgaggtggccgtgttcgagcctagcgaggccgagatcagccacacccagaaagccaccctcgtgtgcctggctaccggcttctaccccgaccatgtggaactgtcttggtgggtcaacggcaaagaggtgcacagcggcgtgtgtaccgacccccagccactgaaagaacagcccgccctgaacgacagccggtactgcctgagcagcagactgagagtgtccgccaccttctggcagaacccccggaaccacttcagatgccaggtgcagttctacggcctgagcgagaacgacgagtggacccaggacagagccaagcccgtgacccagatcgtgtctgccgaagcctggggcagagccgattgcggctttaccagcgagagctaccagcagggcgtgctgagcgccaccatcctgtacgagatcctgctgggcaaggccaccctgtacgccgtgctggtgtctgccctggtgctgatggctatggtcaagcggaaggacagccggggaagggccaagcgatctggatctggagcaacaaacttctcactactcaaacaagcaggtgacgtggaggagaatcccgggcctactagtgccaccatggactggatttggcgcatccttttccttgtcggcgctgctaccggcgcccattccgaggttcagctgcttgagtctggcggaggactggttcaacctggcggaagcctgagactgtcttgtgccgcttccggcttcagcttcagcagctatgccctgagctgggtccgacaggctcctggcaaaggactggaatgggtgtccagcatcggcgagaatgacggcaccaccgattatgccgatgccgtgaagggcagattcaccatctctcgggacaacagcaagaacaccctgtacctccagatgaacagcctcagagtggaagataccgccgtgtactactgcgtgaaggacggcgttcactggggccagggaacactggttacagtgtctagcggatccggcggaggcggaagtggaggcggaggatctttcgaacaagttcagcttcaacagcctggcgctgagctggtcaaacctggcgcttctgtgaagatgagctgcaaagccagcggctacgccttcagcagctactggatcaactggatgaagcagaaacccggccagggactcgaatggatcggccaaatctatcccggcgacggcgacaccaactacaacggcaagttcaagggcagagccacactgaccgccgatacctctagcagcacagcctacatgcagctgagcagcctgaccagcgaagatagcgccgtgtacttctgtgcccggtccatcacaacagtcgtgggctgcgctatggactattggggccagggaacaagcgtgaccgtgtctagtacgcgtgcctctacaaagggaccctccgtgtttcctctggctcccagcagcaagtctacaagcggaggaacagccgctctgggctgcctggtcaaggattactttcccgagcctgtgaccgtgtcctggaatagcggagcactgacaagcggcgtgcacacctttccagccgtgctgcaaagcagcggcctgtactctctgagcagcgtggtcacagtgcctagctctagcctgggcacccagacctacatctgcaatgtgaaccacaagcctagcaacaccaaggtggacaagagagtggaacccaagagctgtatccccgaggacacattcttcccaagccccgagagcagctgcgacgtgaagctggtggaaaagagcttcgagacagacaccaacctgaacttccagaacctgagcgtgatcggcttcagaatcctgctgctgaaagtggccggctttaacctgctgatgaccctgcggctgtggtccagccgcgccaagagaagcggatctggcgtgaagcagaccctgaatttcgacctgctgaagctggctggcgacgtggaatccaacccaggcccttctagaggccatatgaccgagtacaagcccacggtgcgcctcgccacccgcgacgacgtccccagggccgtacgcaccctcgccgccgcgttcgccgactaccccgccacgcgccacaccgtcgatccggaccgccacatcgagcgggtcaccgagctgcaagaactcttcctcacgcgcgtcgggctcgacatcggcaaggtgtgggtcgcggacgacggcgccgcggtggcggtctggaccacgccggagagcgtcgaagcgggggcggtgttcgccgagatcggcccgcgcatggccgagttgagcggttcccggctggccgcgcagcaacagatggaaggcctcctggcgccgcaccggcccaaggagcccgcgtggttcctggccaccgtcggcgtctcgcccgaccaccagggcaagggtctgggcagcgccgtcgtgctccccggagtggaggcggccgagcgcgccggggtgcccgccttcctggagacctccgcgccccgcaacctccccttctacgagcggctcggcttcaccgtcaccgccgacgtcgaggtgcccgaaggaccgcgcacctggtgcatgacccgcaagcccggtgcctga

SEQ ID NO: 22190 - DNA, 3033 bp, Artificial Sequence
  Synthetic Polynucleotide
atggccttaccagtgaccgccttgctcctgccgctggccttgctgctccacgccgccaggccggacatccagatgacacagagccctagcagcctgtctgccagcgtgggagacagagtgaccatcacatgcaaggccagcgaccacatcaacaactggctggcctggtatcagcagaagcctggacaggcccctaagctgctgatctacggcgctaccacactggaaacaggcgtgcccagcagattttctggcagcggctctggcaccgactacaccctgacaatatccagcctccagcctgaggacttcgccacctactactgtcagcagagctggaacaccccttggacattcggccagggcaccaagctggaaatcaagagactcgaggacctgaagaacgtgttcccacctgaggtggccgtgttcgagcctagcgaggccgagatcagccacacccagaaagccaccctcgtgtgcctggctaccggcttctaccccgaccatgtggaactgtcttggtgggtcaacggcaaagaggtgcacagcggcgtgtgtaccgacccccagccactgaaagaacagcccgccctgaacgacagccggtactgcctgagcagcagactgagagtgtccgccaccttctggcagaacccccggaaccacttcagatgccaggtgcagttctacggcctgagcgagaacgacgagtggacccaggacagagccaagcccgtgacccagatcgtgtctgccgaagcctggggcagagccgattgcggctttaccagcgagagctaccagcagggcgtgctgagcgccaccatcctgtacgagatcctgctgggcaaggccaccctgtacgccgtgctggtgtctgccctggtgctgatggctatggtcaagcggaaggacagccggggaagggccaagcgatctggatctggagcaacaaacttctcactactcaaacaagcaggtgacgtggaggagaatcccgggcctactagtgccaccatggactggatttggcgcatccttttccttgtcggcgctgctaccggcgcccattccgaggttcagctgcttgagtctggcggaggactggttcaacctggcggaagcctgagactgtcttgtgccgcttccggcttcagcttcagcagctatgccctgagctgggtccgacaggctcctggcaaaggactggaatgggtgtccagcatcggcgagaatgacggcaccaccgattatgccgatgccgtgaagggcagattcaccatctctcgggacaacagcaagaacaccctgtacctccagatgaacagcctcagagtggaagataccgccgtgtactactgcgtgaaggacggcgttcactggggccagggaacactggttacagtgtctagcggatccggcggcggaggatctggcggaggcggatctgggggcggaggctctttcgaacaagttcagcttcaacagcctggcgctgagctggtcaaacctggcgcttctgtgaagatgagctgcaaagccagcggctacgccttcagcagctactggatcaactggatgaagcagaaacccggccagggactcgaatggatcggccaaatctatcccggcgacggcgacaccaactacaacggcaagttcaagggcagagccacactgaccgccgatacctctagcagcacagcctacatgcagctgagcagcctgaccagcgaagatagcgccgtgtacttctgtgcccggtccatcacaacagtcgtgggctgcgctatggactattggggccagggaacaagcgtgaccgtgtctagtacgcgtgcctctacaaagggaccctccgtgtttcctctggctcccagcagcaagtctacaagcggaggaacagccgctctgggctgcctggtcaaggattactttcccgagcctgtgaccgtgtcctggaatagcggagcactgacaagcggcgtgcacacctttccagccgtgctgcaaagcagcggcctgtactctctgagcagcgtggtcacagtgcctagctctagcctgggcacccagacctacatctgcaatgtgaaccacaagcctagcaacaccaaggtggacaagagagtggaacccaagagctgtatccccgaggacacattcttcccaagccccgagagcagctgcgacgtgaagctggtggaaaagagcttcgagacagacaccaacctgaacttccagaacctgagcgtgatcggcttcagaatcctgctgctgaaagtggccggctttaacctgctgatgaccctgcggctgtggtccagccgcgccaagagaagcggatctggcgtgaagcagaccctgaatttcgacctgctgaagctggctggcgacgtggaatccaacccaggcccttctagaggccatatgaccgagtacaagcccacggtgcgcctcgccacccgcgacgacgtccccagggccgtacgcaccctcgccgccgcgttcgccgactaccccgccacgcgccacaccgtcgatccggaccgccacatcgagcgggtcaccgagctgcaagaactcttcctcacgcgcgtcgggctcgacatcggcaaggtgtgggtcgcggacgacggcgccgcggtggcggtctggaccacgccggagagcgtcgaagcgggggcggtgttcgccgagatcggcccgcgcatggccgagttgagcggttcccggctggccgcgcagcaacagatggaaggcctcctggcgccgcaccggcccaaggagcccgcgtggttcctggccaccgtcggcgtctcgcccgaccaccagggcaagggtctgggcagcgccgtcgtgctccccggagtggaggcggccgagcgcgccggggtgcccgccttcctggagacctccgcgccccgcaacctccccttctacgagcggctcggcttcaccgtcaccgccgacgtcgaggtgcccgaaggaccgcgcacctggtgcatgacccgcaagcccggtgcctga

SEQ ID NO: 22191 - DNA, 2739 bp, Artificial Sequence
  Synthetic Polynucleotide
atggccttaccagtgaccgccttgctcctgccgctggccttgctgctccacgccgccaggccggacatccagatgacacagagccctagcagcctgtctgccagcgtgggagacagagtgaccatcacatgcaaggccagcgaccacatcaacaactggctggcctggtatcagcagaagcctggacaggcccctaagctgctgatctacggcgctaccacactggaaacaggcgtgcccagcagattttctggcagcggctctggcaccgactacaccctgacaatatccagcctccagcctgaggacttcgccacctactactgtcagcagagctggaacaccccttggacattcggccagggcaccaagctggaaatcaagagactcgaggacctgaagaacgtgttcccacctgaggtggccgtgttcgagcctagcgaggccgagatcagccacacccagaaagccaccctcgtgtgcctggctaccggcttctaccccgaccatgtggaactgtcttggtgggtcaacggcaaagaggtgcacagcggcgtgtgtaccgacccccagccactgaaagaacagcccgccctgaacgacagccggtactgcctgagcagcagactgagagtgtccgccaccttctggcagaacccccggaaccacttcagatgccaggtgcagttctacggcctgagcgagaacgacgagtggacccaggacagagccaagcccgtgacccagatcgtgtctgccgaagcctggggcagagccgattgcggctttaccagcgagagctaccagcagggcgtgctgagcgccaccatcctgtacgagatcctgctgggcaaggccaccctgtacgccgtgctggtgtctgccctggtgctgatggctatggtcaagcggaaggacagccggggaagggccaagcgatctggatctggagcaacaaacttctcactactcaaacaagcaggtgacgtggaggagaatcccgggcctactagtgccaccatggactggatttggcgcatccttttccttgtcggcgctgctaccggcgcccattccgggcccgtgtgtatgccttgttttaccacggatcaacaaatggctcgcaagtgttctgactgctgcggaggcaaaggccggggaaagtgttatggcccacagtgtctgtgccggggatccggcggcggaggatctggcggaggcggatctgggggcggaggctctttcgaacaagttcagcttcaacagcctggcgctgagctggtcaaacctggcgcttctgtgaagatgagctgcaaagccagcggctacgccttcagcagctactggatcaactggatgaagcagaaacccggccagggactcgaatggatcggccaaatctatcccggcgacggcgacaccaactacaacggcaagttcaagggcagagccacactgaccgccgatacctctagcagcacagcctacatgcagctgagcagcctgaccagcgaagatagcgccgtgtacttctgtgcccggtccatcacaacagtcgtgggctgcgctatggactattggggccagggaacaagcgtgaccgtgtctagtacgcgtatccagaaccctgatcctgccgtgtaccagctgcgggatagcaagagcagcgacaagagcgtgtgtctgttcaccgacttcgacagccagaccaacgtgtcccagagcaaggactccgacgtgtacatcaccgataagtgcgtgctggacatgcggagcatggacttcaagagcaactccgccgtggcctggtccaacaagtccgatttcgcctgcgccaacgccttcaacaacagcattatccccgaggacacattcttcccaagccccgagagcagctgcgacgtgaagctggtggaaaagagcttcgagacagacaccaacctgaacttccagaacctgagcgtgatcggcttcagaatcctgctgctgaaagtggccggctttaacctgctgatgaccctgcggctgtggtccagccgcgccaagagaagcggatctggcgtgaagcagaccctgaatttcgacctgctgaagctggctggcgacgtggaatccaacccaggcccttctagagcccatatgaccgagtacaagcccacggtgcgcctcgccacccgcgacgacgtccccagggccgtacgcaccctcgccgccgcgttcgccgactaccccgccacgcgccacaccgtcgatccggaccgccacatcgagcgggtcaccgagctgcaagaactcttcctcacgcgcgtcgggctcgacatcggcaaggtgtgggtcgcggacgacggcgccgcggtggcggtctggaccacgccggagagcgtcgaagcgggggcggtgttcgccgagatcggcccgcgcatggccgagttgagcggttcccggctggccgcgcagcaacagatggaaggcctcctggcgccgcaccggcccaaggagcccgcgtggttcctggccaccgtcggcgtctcgcccgaccaccagggcaagggtctgggcagcgccgtcgtgctccccggagtggaggcggccgagcgcgccggggtgcccgccttcctggagacctccgcgccccgcaacctccccttctacgagcggctcggcttcaccgtcaccgccgacgtcgaggtgcccgaaggaccgcgcacctggtgcatgacccgcaagcccggtgcctga

SEQ ID NO: 22192 - DNA, 3153 bp, Artificial Sequence
  Synthetic Polynucleotide
atggccttaccagtgaccgccttgctcctgccgctggccttgctgctccacgccgccaggccgatgtgtatgccctgcttcaccaccgaccatcagatggcccggaagtgcgacgattgctgtggcggaaaaggcagaggcaagtgctacggccctcagtgcttgtgtagaggtaccggcggaggcggatctggcggcggaggtagcggtggcggaggatctgaattcgacatccagatgacacagagccctagcagcctgtctgccagcgtgggagacagagtgaccatcacatgcaaggccagcgaccacatcaacaactggctggcctggtatcagcagaagcctggacaggcccctaagctgctgatctacggcgctaccacactggaaacaggcgtgcccagcagattttctggcagcggctctggcaccgactacaccctgacaatatccagcctccagcctgaggacttcgccacctactactgtcagcagagctggaacaccccttggacattcggccagggcaccaagctggaaatcaagagactcgagatccagaaccctgatcctgccgtgtaccagctgcgggatagcaagagcagcgacaagagcgtgtgtctgttcaccgacttcgacagccagaccaacgtgtcccagagcaaggactccgacgtgtacatcaccgataagtgcgtgctggacatgcggagcatggacttcaagagcaactccgccgtggcctggtccaacaagtccgatttcgcctgcgccaacgccttcaacaacagcattatccccgaggacacattcttcccaagcagcgacgtgccctgcgacgtgaagctggtggaaaagagcttcgagacagacaccaacctgaacttccagaacctgagcgtgatcggcttcagaatcctgctgctgaaagtggccggctttaacctgctgatgaccctgcggctgtggtccagccgcgccaagagaagcggatctggcgtgaagcagaccctgaatttcgacctgctgaagctggctggcgacgtggaatccaacccaggccctactagtgccaccatggactggatttggcgcatccttttccttgtcggcgctgctaccggcgcccattccgggccccaggttcagctgcaagagtctggcggaggacttgctcaagctggcggaagcctgagactgtcttgtgccgcctctggcagaaccttcagcatgggctggtttagacaggcccctggcaaagagagagagttcgtcgccgccatcacatacagcggcggcagcccttactacgcctcttctgtcagaggccggttcaccatcagccgggacaacgccaagaacaccgtgtacctccagatgaacagcctgaagccagaggacaccgccgtgtactactgtgccgccaatccaacctacggcagcgactggaatgccgagaattggggccagggcacccaagtgacagtgtctagtggatccggcggcggaggatctggcggaggcggatctgggggcggaggctctttcgaacaagttcagcttcaacagcctggcgctgagctggtcaaacctggcgcttctgtgaagatgagctgcaaagccagcggctacgccttcagcagctactggatcaactggatgaagcagaaacccggccagggactcgaatggatcggccaaatctatcccggcgacggcgacaccaactacaacggcaagttcaagggcagagccacactgaccgccgatacctctagcagcacagcctacatgcagctgagcagcctgaccagcgaagatagcgccgtgtacttctgtgcccggtccatcacaacagtcgtgggctgcgctatggactattggggccagggaacaagcgtgaccgtgtctagtacgcgtgaggacctgaagaacgtgttcccacctgaggtggccgtgttcgagcctagcaaggccgagatcgcccacacccagaaagccaccctcgtgtgcctggctaccggcttctaccccgaccatgtggaactgtcttggtgggtcaacggcaaagaggtgcacagcggcgtgtgtaccgacccccagccactgaaagaacagcccgccctgaacgacagccggtactgcctgagcagcagactgagagtgtccgccaccttctggcagaacccccggaaccacttcagatgccaggtgcagttctacggcctgagcgagaacgacgagtggacccaggacagagccaagcccgtgacccagatcgtgtctgccgaagcctggggcagagccgattgcggcatcaccagcgccagctaccaccagggcgtgctgagcgccaccatcctgtacgagatcctgctgggcaaggccaccctgtacgccgtgctggtgtctgccctggtgctgatggctatggtcaagcggaaggacagccggggaagggccaagcgatctggatctggagcaacaaacttctcactactcaaacaagcaggtgacgtggaggagaatcccgggccttctagaggccatatgaccgagtacaagcccacggtgcgcctcgccacccgcgacgacgtccccagggccgtacgcaccctcgccgccgcgttcgccgactaccccgccacgcgccacaccgtcgatccggaccgccacatcgagcgggtcaccgagctgcaagaactcttcctcacgcgcgtcgggctcgacatcggcaaggtgtgggtcgcggacgacggcgccgcggtggcggtctggaccacgccggagagcgtcgaagcgggggcggtgttcgccgagatcggcccgcgcatggccgagttgagcggttcccggctggccgcgcagcaacagatggaaggcctcctggcgccgcaccggcccaaggagcccgcgtggttcctggccaccgtcggcgtctcgcccgaccaccagggcaagggtctgggcagcgccgtcgtgctccccggagtggaggcggccgagcgcgccggggtgcccgccttcctggagacctccgcgccccgcaacctccccttctacgagcggctcggcttcaccgtcaccgccgacgtcgaggtgcccgaaggaccgcgcacctggtgcatgacccgcaagcccggtgcctga

SEQ ID NO: 22193 - DNA, 2739 bp, Artificial Sequence
  Synthetic Polynucleotide
atggccttaccagtgaccgccttgctcctgccgctggccttgctgctccacgccgccaggccggacatccagatgacacagagccctagcagcctgtctgccagcgtgggagacagagtgaccatcacatgcaaggccagcgaccacatcaacaactggctggcctggtatcagcagaagcctggacaggcccctaagctgctgatctacggcgctaccacactggaaacaggcgtgcccagcagattttctggcagcggctctggcaccgactacaccctgacaatatccagcctccagcctgaggacttcgccacctactactgtcagcagagctggaacaccccttggacattcggccagggcaccaagctggaaatcaagagactcgaggacctgaagaacgtgttcccacctgaggtggccgtgttcgagcctagcgaggccgagatcagccacacccagaaagccaccctcgtgtgcctggctaccggcttctaccccgaccatgtggaactgtcttggtgggtcaacggcaaagaggtgcacagcggcgtgtgtaccgacccccagccactgaaagaacagcccgccctgaacgacagccggtactgcctgagcagcagactgagagtgtccgccaccttctggcagaacccccggaaccacttcagatgccaggtgcagttctacggcctgagcgagaacgacgagtggacccaggacagagccaagcccgtgacccagatcgtgtctgccgaagcctggggcagagccgattgcggctttaccagcgagagctaccagcagggcgtgctgagcgccaccatcctgtacgagatcctgctgggcaaggccaccctgtacgccgtgctggtgtctgccctggtgctgatggctatggtcaagcggaaggacagccggggaagggccaagcgatctggatctggagcaacaaacttctcactactcaaacaagcaggtgacgtggaggagaatcccgggcctactagtgccaccatggactggatttggcgcatccttttccttgtcggcgctgctaccggcgcccattccgggcccgtgtgtatgccttgttttaccacggatcaacaaatggctcgcaagtgttctgactgctgcggaggcaaaggccggggaaagtgttatggcccacagtgtctgtgccggggatccggcggcggaggatctggcggaggcggatctgggggcggaggctctttcgaacaagttcagcttcaacagcctggcgctgagctggtcaaacctggcgcttctgtgaagatgagctgcaaagccagcggctacgccttcagcagctactggatcaactggatgaagcagaaacccggccagggactcgaatggatcggccaaatctatcccggcgacggcgacaccaactacaacggcaagttcaagggcagagccacactgaccgccgatacctctagcagcacagcctacatgcagctgagcagcctgaccagcgaagatagcgccgtgtacttctgtgcccggtccatcacaacagtcgtgggctgcgctatggactattggggccagggaacaagcgtgaccgtgtctagtacgcgtatccagaaccctgatcctgccgtgtaccagctgcgggatagcaagagcagcgacaagagcgtgtgtctgttcaccgacttcgacagccagaccaacgtgtcccagagcaaggactccgacgtgtacatcaccgataagtgcgtgctggacatgcggagcatggacttcaagagcaactccgccgtggcctggtccaacaagtccgatttcgcctgcgccaacgccttcaacaacagcattatccccgaggacacattcttcccaagccccgagagcagctgcgacgtgaagctggtggaaaagagcttcgagacagacaccaacctgaacttccagaacctgagcgtgatcggcttcagaatcctgctgctgaaagtggccggctttaacctgctgatgaccctgcggctgtggtccagccgcgccaagagaagcggatctggcgtgaagcagaccctgaatttcgacctgctgaagctggctggcgacgtggaatccaacccaggcccttctagaggccatatgaccgagtacaagcccacggtgcgcctcgccacccgcgacgacgtccccagggccgtacgcaccctcgccgccgcgttcgccgactaccccgccacgcgccacaccgtcgatccggaccgccacatcgagcgggtcaccgagctgcaagaactcttcctcacgcgcgtcgggctcgacatcggcaaggtgtgggtcgcggacgacggcgccgcggtggcggtctggaccacgccggagagcgtcgaagcgggggcggtgttcgccgagatcggcccgcgcatggccgagttgagcggttcccggctggccgcgcagcaacagatggaaggcctcctggcgccgcaccggcccaaggagcccgcgtggttcctggccaccgtcggcgtctcgcccgaccaccagggcaagggtctgggcagcgccgtcgtgctccccggagtggaggcggccgagcgcgccggggtgcccgccttcctggagacctccgcgccccgcaacctccccttctacgagcggctcggcttcaccgtcaccgccgacgtcgaggtgcccgaaggaccgcgcacctggtgcatgacccgcaagcccggtgcctga

SEQ ID NO: 22194 - DNA, 2466 bp, Artificial Sequence
  Synthetic Polynucleotide
atggccttaccagtgaccgccttgctcctgccgctggccttgctgctccacgccgccaggccgcagctccagctgcaagagtctggacctggcctggtcaagcctagcgagacactgagcctgacctgtaccgtgtccggcgatagcatcagcagcggcgattactactggggctggatcagacagcctcctggcaaaggactggaatggatcggccacatctactacagcggcgtgacctactacaaccccagcctgaagtccagagtgaccatcagcgtggacaccagccggaaccagttctccctgaagctgtctagcgtgacagccgccgataccgccgtgtactactgcaccagagaggacagcagcaactggcggagtagaggccagggaacactggtcacagttagctctctcgagggacagcctaaggccaatcctaccgtgacactgttccctccaagcagcgaagaactccaggccaacaaggccacacttgtgtgcctgatctccgacttctaccctggggctgtgacagtggcttggaaggccgatggatctcctgtgaaagccggcgtggaaaccaccaagccatccaagcagagcaacaacaaatacgccgccagctcctacctgagcctgacacctgagcagtggaagtcccacagatcctacagctgccaagtgacccacgaaggcagcaccgtggaaaagacagtggcccctacagagtgcagccccatcaagaccgatgtgattacaatggaccccaaggacaactgctccaaggacgccaacgataccctgctgctccagctgaccaacaccagcgcctactacatgtacttgttgctgctgctgaagtccgtggtgtacttcgccatcatcacatgctgcctgctgcggagaaccgccttctgctgcaacggcgagaagtctagggccaagcgatctggatctggagcaacaaacttctcactactcaaacaagcaggtgacgtggaggagaatcccgggcctactagtatggactggatttggcgcatccttttccttgtcggcgctgctaccggcgcgcattccttcgaatacgccaaagagatgcggaacgcctactgggagatcgccctgctgcccaatctgaccaaccagcagaagagagcccccatcagaaagctgtacgacgacccctcccagagcagcgagctgctgtctgaggctaaaaaactgaacgatagccagacgcgtgcctctacaaagggaccctccgtgtttcctctggctcccagcagcaagtctacaagcggaggaacagccgctctgggctgcctggtcaaggattactttcccgagcctgtgaccgtgtcctggaatagcggagcactgacaagcggcgtgcacacctttccagccgtgctgcaaagcagcggcctgtactctctgagcagcgtggtcacagtgcctagctctagcctgggcacccagacctacatctgcaatgtgaaccacaagcctagcaacaccaaggtggacaagagagtggaacccaagagctgtgaagtgaaaaccgactccaccgaccacgtgaagcccaaagagacagagaacaccaagcagcccagcaagagctgccacaagcccaaggccatcgtgcacaccgagaaagtgaacatgatgagcctgaccgtgctgggcctgcggatgctgttcgccaaaaccgtggccgtgaacttcctgctgaccgccaagctgttcttcctccgcgccaagagaagcggatctggcgtgaagcagaccctgaatttcgacctgctgaagctggctggcgacgtggaatccaacccaggcccttctagaggccatatgaccgagtacaagcccacggtgcgcctcgccacccgcgacgacgtccccagggccgtacgcaccctcgccgccgcgttcgccgactaccccgccacgcgccacaccgtcgatccggaccgccacatcgagcgggtcaccgagctgcaagaactcttcctcacgcgcgtcgggctcgacatcggcaaggtgtgggtcgcggacgacggcgccgcggtggcggtctggaccacgccggagagcgtcgaagcgggggcggtgttcgccgagatcggcccgcgcatggccgagttgagcggttcccggctggccgcgcagcaacagatggaaggcctcctggcgccgcaccggcccaaggagcccgcgtggttcctggccaccgtcggcgtctcgcccgaccaccagggcaagggtctgggcagcgccgtcgtgctccccggagtggaggcggccgagcgcgccggggtgcccgccttcctggagacctccgcgccccgcaacctccccttctacgagcggctcggcttcaccgtcaccgccgacgtcgaggtgcccgaaggaccgcgcacctggtgcatgacccgcaagcccggtgcctga

SEQ ID NO: 22195 - DNA, 3003 bp, Artificial Sequence
  Synthetic Polynucleotide
atggccttaccagtgaccgccttgctcctgccgctggccttgctgctccacgccgccaggccggacatccagatgacacagagccctagcagcctgtctgccagcgtgggagacagagtgaccatcacatgcaaggccagcgaccacatcaacaactggctggcctggtatcagcagaagcctggacaggcccctaagctgctgatctacggcgctaccacactggaaacaggcgtgcccagcagattttctggcagcggctctggcaccgactacaccctgacaatatccagcctccagcctgaggacttcgccacctactactgtcagcagagctggaacaccccttggacattcggccagggcaccaagctggaaatcaagagactcgaggacctgaagaacgtgttcccacctgaggtggccgtgttcgagcctagcgaggccgagatcagccacacccagaaagccaccctcgtgtgcctggctaccggcttctaccccgaccatgtggaactgtcttggtgggtcaacggcaaagaggtgcacagcggcgtgtgtaccgacccccagccactgaaagaacagcccgccctgaacgacagccggtactgcctgagcagcagactgagagtgtccgccaccttctggcagaacccccggaaccacttcagatgccaggtgcagttctacggcctgagcgagaacgacgagtggacccaggacagagccaagcccgtgacccagatcgtgtctgccgaagcctggggcagagccgattgcggctttaccagcgagagctaccagcagggcgtgctgagcgccaccatcctgtacgagatcctgctgggcaaggccaccctgtacgccgtgctggtgtctgccctggtgctgatggctatggtcaagcggaaggacagccggggaagggccaagcgatctggatctggagcaacaaacttctcactactcaaacaagcaggtgacgtggaggagaatcccgggcctactagtgccaccatggactggatttggcgcatccttttccttgtcggcgctgctaccggcgcccattccgggcccggctctgacctgggcatcaagctgctgttcgccgctgccaagggccaggacgacgaagtgcggattctgctggctgctggggccgacgtgaacgccaaggatttcgagggctacacccccctgcacgtggccgcctatgatggacacctggaaatcgtggaagtgctgctgaaggctggcgctgatgtgaatgccaaagacagccagggccggacccctctgcatgaagccgcctacagcggccatctggaaattgtggaagtgctgctgaaagccggggcagacgtgaacgctcaggacgacgctggcgagacaccagccgatctggctgcagcttggggccacgaagatatcgccgaggtgctgcagaagggatccggcggcggaggatctggcggaggcggatctgggggcggaggctctttcgaacaagttcagcttcaacagcctggcgctgagctggtcaaacctggcgcttctgtgaagatgagctgcaaagccagcggctacgccttcagcagctactggatcaactggatgaagcagaaacccggccagggactcgaatggatcggccaaatctatcccggcgacggcgacaccaactacaacggcaagttcaagggcagagccacactgaccgccgatacctctagcagcacagcctacatgcagctgagcagcctgaccagcgaagatagcgccgtgtacttctgtgcccggtccatcacaacagtcgtgggctgcgctatggactattggggccagggaacaagcgtgaccgtgtctagtacgcgtatccagaaccctgatcctgccgtgtaccagctgcgggatagcaagagcagcgacaagagcgtgtgtctgttcaccgacttcgacagccagaccaacgtgtcccagagcaaggactccgacgtgtacatcaccgataagtgcgtgctggacatgcggagcatggacttcaagagcaactccgccgtggcctggtccaacaagtccgatttcgcctgcgccaacgccttcaacaacagcattatccccgaggacacattcttcccaagccccgagagcagctgcgacgtgaagctggtggaaaagagcttcgagacagacaccaacctgaacttccagaacctgagcgtgatcggcttcagaatcctgctgctgaaagtggccggctttaacctgctgatgaccctgcggctgtggtccagccgcgccaagagaagcggatctggcgtgaagcagaccctgaatttcgacctgctgaagctggctggcgacgtggaatccaacccaggcccttctagaggccatatgaccgagtacaagcccacggtgcgcctcgccacccgcgacgacgtccccagggccgtacgcaccctcgccgccgcgttcgccgactaccccgccacgcgccacaccgtcgatccggaccgccacatcgagcgggtcaccgagctgcaagaactcttcctcacgcgcgtcgggctcgacatcggcaaggtgtgggtcgcggacgacggcgccgcggtggcggtctggaccacgccggagagcgtcgaagcgggggcggtgttcgccgagatcggcccgcgcatggccgagttgagcggttcccggctggccgcgcagcaacagatggaaggcctcctggcgccgcaccggcccaaggagcccgcgtggttcctggccaccgtcggcgtctcgcccgaccaccagggcaagggtctgggcagcgccgtcgtgctccccggagtggaggcggccgagcgcgccggggtgcccgccttcctggagacctccgcgccccgcaacctccccttctacgagcggctcggcttcaccgtcaccgccgacgtcgaggtgcccgaaggaccgcgcacctggtgcatgacccgcaagcccggtgcctga

SEQ ID NO: 22196 - DNA, 2988 bp, Artificial Sequence
  Synthetic Polynucleotide
atggccttaccagtgaccgccttgctcctgccgctggccttgctgctccacgccgccaggccggacatccagatgacacagagccctagcagcctgtctgccagcgtgggagacagagtgaccatcacatgcaaggccagcgaccacatcaacaactggctggcctggtatcagcagaagcctggacaggcccctaagctgctgatctacggcgctaccacactggaaacaggcgtgcccagcagattttctggcagcggctctggcaccgactacaccctgacaatatccagcctccagcctgaggacttcgccacctactactgtcagcagagctggaacaccccttggacattcggccagggcaccaagctggaaatcaagagactcgaggacctgaagaacgtgttcccacctgaggtggccgtgttcgagcctagcgaggccgagatcagccacacccagaaagccaccctcgtgtgcctggctaccggcttctaccccgaccatgtggaactgtcttggtgggtcaacggcaaagaggtgcacagcggcgtgtgtaccgacccccagccactgaaagaacagcccgccctgaacgacagccggtactgcctgagcagcagactgagagtgtccgccaccttctggcagaacccccggaaccacttcagatgccaggtgcagttctacggcctgagcgagaacgacgagtggacccaggacagagccaagcccgtgacccagatcgtgtctgccgaagcctggggcagagccgattgcggctttaccagcgagagctaccagcagggcgtgctgagcgccaccatcctgtacgagatcctgctgggcaaggccaccctgtacgccgtgctggtgtctgccctggtgctgatggctatggtcaagcggaaggacagccggggaagggccaagcgatctggatctggagcaacaaacttctcactactcaaacaagcaggtgacgtggaggagaatcccgggcctactagtgccaccatggactggatttggcgcatccttttccttgtcggcgctgctaccggcgcccattccgggcccgaagtgcaactggtggaatctgggggcggactggtgcagccaggcggaagtctgaggctgtcttgtgccgcctccggcagcatcttcggcttcaacgacatggcctggtatcggcaggctcccggaaaacagcgcgagctggtggctctgattagcagagtgggcgtgaccagcagcgccgactctgtgaagggcagattcacaatctccagagtgaacgccaaggatacagtgtacctccagatgaactctctgaaacctgaggatacagcagtgtactattgctacatggaccagcggctggacggcagcacactggcctactggggacagggaactcaagtgacagtgtctagcggatccggcggcggaggatctggcggaggcggatctgggggcggaggctctttcgaacaagttcagcttcaacagcctggcgctgagctggtcaaacctggcgcttctgtgaagatgagctgcaaagccagcggctacgccttcagcagctactggatcaactggatgaagcagaaacccggccagggactcgaatggatcggccaaatctatcccggcgacggcgacaccaactacaacggcaagttcaagggcagagccacactgaccgccgatacctctagcagcacagcctacatgcagctgagcagcctgaccagcgaagatagcgccgtgtacttctgtgcccggtccatcacaacagtcgtgggctgcgctatggactattggggccagggaacaagcgtgaccgtgtctagtacgcgtatccagaaccctgatcctgccgtgtaccagctgcgggatagcaagagcagcgacaagagcgtgtgtctgttcaccgacttcgacagccagaccaacgtgtcccagagcaaggactccgacgtgtacatcaccgataagtgcgtgctggacatgcggagcatggacttcaagagcaactccgccgtggcctggtccaacaagtccgatttcgcctgcgccaacgccttcaacaacagcattatccccgaggacacattcttcccaagccccgagagcagctgcgacgtgaagctggtggaaaagagcttcgagacagacaccaacctgaacttccagaacctgagcgtgatcggcttcagaatcctgctgctgaaagtggccggctttaacctgctgatgaccctgcggctgtggtccagccgcgccaagagaagcggatctggcgtgaagcagaccctgaatttcgacctgctgaagctggctggcgacgtggaatccaacccaggcccttctagaggccatatgaccgagtacaagcccacggtgcgcctcgccacccgcgacgacgtccccagggccgtacgcaccctcgccgccgcgttcgccgactaccccgccacgcgccacaccgtcgatccggaccgccacatcgagcgggtcaccgagctgcaagaactcttcctcacgcgcgtcgggctcgacatcggcaaggtgtgggtcgcggacgacggcgccgcggtggcggtctggaccacgccggagagcgtcgaagcgggggcggtgttcgccgagatcggcccgcgcatggccgagttgagcggttcccggctggccgcgcagcaacagatggaaggcctcctggcgccgcaccggcccaaggagcccgcgtggttcctggccaccgtcggcgtctcgcccgaccaccagggcaagggtctgggcagcgccgtcgtgctccccggagtggaggcggccgagcgcgccggggtgcccgccttcctggagacctccgcgccccgcaacctccccttctacgagcggctcggcttcaccgtcaccgccgacgtcgaggtgcccgaaggaccgcgcacctggtgcatgacccgcaagcccggtgcctga

SEQ ID NO: 22197 - DNA, 3003 bp, Artificial Sequence; identical to SEQ ID NO: 22195
  Synthetic Polynucleotide

SEQ ID NO: 22198 - DNA, 2496 bp, Artificial Sequence
  Synthetic Polynucleotide
atggccctgcccgtgacagccctgctgctgcctctggctctgctgctgcacgccgccagacccgatgaattcgtggacaacaagttcaacaaagagcggtacagcgcctactacgagatttggcaactgcccaacctgaacgtgcggcagaaggccgccttcatcggatctctgcaggacgaccctagccagagcgccaatctgctggccgaggccaagaagctgaacgacgcccaggcccctaaactcgagggacagcctaaggccaatcctaccgtgacactgttccctccaagcagcgaagaactccaggccaacaaggccacacttgtgtgcctgatctccgacttctaccctggggctgtgacagtggcttggaaggccgatggatctcctgtgaaagccggcgtggaaaccaccaagccatccaagcagagcaacaacaaatacgccgccagctcctacctgagcctgacacctgagcagtggaagtcccacagatcctacagctgccaagtgacccacgaaggcagcaccgtggaaaagacagtggcccctacagagtgcagccccatcaagaccgatgtgattacaatggaccccaaggacaactgctccaaggacgccaacgataccctgctgctccagctgaccaacaccagcgcctactacatgtacttgttgctgctgctgaagtccgtggtgtacttcgccatcatcacatgctgcctgctgcggagaaccgccttctgctgcaacggcgagaagtctagggccaagcgatctggatctggagcaacaaacttctcactactcaaacaagcaggtgacgtggaggagaatcccgggcctactagtatggactggatttggcgcatccttttccttgtcggcgctgctaccggcgcgcattccttcgaagtgcagctgcttgaaagtggcggcggactgattcagcctggcggatctctgagactgagctgtgccgccagcggcttcaccttttctagccacgccatgacctgggtccgacaggcacctggaaaagggcttgaatgggtgtccgccatcagcggctctggcgattacacacactacgccgacagcgtgaagggcagattcaccatcagcagagacaacagcaagaacaccgtgtacctccagatgaacagcctgagagccgaggacagcgccgtgtattattgcgccaaggatgaggatggcggcagcctgcttggacacagaggacaaggcaccctggtcaccgtttcttccacgcgtgcctctacaaagggaccctccgtgtttcctctggctcccagcagcaagtctacaagcggaggaacagccgctctgggctgcctggtcaaggattactttcccgagcctgtgaccgtgtcctggaatagcggagcactgacaagcggcgtgcacacctttccagccgtgctgcaaagcagcggcctgtactctctgagcagcgtggtcacagtgcctagctctagcctgggcacccagacctacatctgcaatgtgaaccacaagcctagcaacaccaaggtggacaagagagtggaacccaagagctgtgaagtgaaaaccgactccaccgaccacgtgaagcccaaagagacagagaacaccaagcagcccagcaagagctgccacaagcccaaggccatcgtgcacaccgagaaagtgaacatgatgagcctgaccgtgctgggcctgcggatgctgttcgccaaaaccgtggccgtgaacttcctgctgaccgccaagctgttcttcctccgcgccaagagaagcggatctggcgtgaagcagaccctgaatttcgacctgctgaagctggctggcgacgtggaatccaacccaggcccttctagaggccatatgaccgagtacaagcccacggtgcgcctcgccacccgcgacgacgtccccagggccgtacgcaccctcgccgccgcgttcgccgactaccccgccacgcgccacaccgtcgatccggaccgccacatcgagcgggtcaccgagctgcaagaactcttcctcacgcgcgtcgggctcgacatcggcaaggtgtgggtcgcggacgacggcgccgcggtggcggtctggaccacgccggagagcgtcgaagcgggggcggtgttcgccgagatcggcccgcgcatggccgagttgagcggttcccggctggccgcgcagcaacagatggaaggcctcctggcgccgcaccggcccaaggagcccgcgtggttcctggccaccgtcggcgtctcgcccgaccaccagggcaagggtctgggcagcgccgtcgtgctccccggagtggaggcggccgagcgcgccggggtgcccgccttcctggagacctccgcgccccgcaacctccccttctacgagcggctcggcttcaccgtcaccgccgacgtcgaggtgcccgaaggaccgcgcacctggtgcatgacccgcaagcccggtgcctga

SEQ ID NO: 22199 - DNA, 2805 bp, Artificial Sequence
  Synthetic Polynucleotide
atggccttaccagtgaccgccttgctcctgccgctggccttgctgctccacgccgccaggccggacatccagatgacacagagccctagcagcctgtctgccagcgtgggagacagagtgaccatcacatgcaaggccagcgaccacatcaacaactggctggcctggtatcagcagaagcctggacaggcccctaagctgctgatctacggcgctaccacactggaaacaggcgtgcccagcagattttctggcagcggctctggcaccgactacaccctgacaatatccagcctccagcctgaggacttcgccacctactactgtcagcagagctggaacaccccttggacattcggccagggcaccaagctggaaatcaagagactcgaggacctgaagaacgtgttcccacctgaggtggccgtgttcgagcctagcgaggccgagatcagccacacccagaaagccaccctcgtgtgcctggctaccggcttctaccccgaccatgtggaactgtcttggtgggtcaacggcaaagaggtgcacagcggcgtgtgtaccgacccccagccactgaaagaacagcccgccctgaacgacagccggtactgcctgagcagcagactgagagtgtccgccaccttctggcagaacccccggaaccacttcagatgccaggtgcagttctacggcctgagcgagaacgacgagtggacccaggacagagccaagcccgtgacccagatcgtgtctgccgaagcctggggcagagccgattgcggctttaccagcgagagctaccagcagggcgtgctgagcgccaccatcctgtacgagatcctgctgggcaaggccaccctgtacgccgtgctggtgtctgccctggtgctgatggctatggtcaagcggaaggacagccggggaagggccaagcgatctggatctggagcaacaaacttctcactactcaaacaagcaggtgacgtggaggagaatcccgggcctactagtgccaccatggactggatttggcgcatccttttccttgtcggcgctgctaccggcgcccattccgggcccgtggacaacaagttcaacaaagagcggtacagcgcctactacgagatttggcaactgcccaacctgaacgtgcggcagaaggccgccttcatcggatctctgcaggacgaccctagccagagcgccaatctgctggccgaggccaagaagctgaacgacgcccaggcccctaaaggatccggcggcggaggatctggcggaggcggatctgggggcggaggctctttcgaacaagttcagcttcaacagcctggcgctgagctggtcaaacctggcgcttctgtgaagatgagctgcaaagccagcggctacgccttcagcagctactggatcaactggatgaagcagaaacccggccagggactcgaatggatcggccaaatctatcccggcgacggcgacaccaactacaacggcaagttcaagggcagagccacactgaccgccgatacctctagcagcacagcctacatgcagctgagcagcctgaccagcgaagatagcgccgtgtacttctgtgcccggtccatcacaacagtcgtgggctgcgctatggactattggggccagggaacaagcgtgaccgtgtctagtacgcgtatccagaaccctgatcctgccgtgtaccagctgcgggatagcaagagcagcgacaagagcgtgtgtctgttcaccgacttcgacagccagaccaacgtgtcccagagcaaggactccgacgtgtacatcaccgataagtgcgtgctggacatgcggagcatggacttcaagagcaactccgccgtggcctggtccaacaagtccgatttcgcctgcgccaacgccttcaacaacagcattatccccgaggacacattcttcccaagccccgagagcagctgcgacgtgaagctggtggaaaagagcttcgagacagacaccaacctgaacttccagaacctgagcgtgatcggcttcagaatcctgctgctgaaagtggccggctttaacctgctgatgaccctgcggctgtggtccagccgcgccaagagaagcggatctggcgtgaagcagaccctgaatttcgacctgctgaagctggctggcgacgtggaatccaacccaggcccttctagaggccatatgaccgagtacaagcccacggtgcgcctcgccacccgcgacgacgtccccagggccgtacgcaccctcgccgccgcgttcgccgactaccccgccacgcgccacaccgtcgatccggaccgccacatcgagcgggtcaccgagctgcaagaactcttcctcacgcgcgtcgggctcgacatcggcaaggtgtgggtcgcggacgacggcgccgcggtggcggtctggaccacgccggagagcgtcgaagcgggggcggtgttcgccgagatcggcccgcgcatggccgagttgagcggttcccggctggccgcgcagcaacagatggaaggcctcctggcgccgcaccggcccaaggagcccgcgtggttcctggccaccgtcggcgtctcgcccgaccaccagggcaagggtctgggcagcgccgtcgtgctccccggagtggaggcggccgagcgcgccggggtgcccgccttcctggagacctccgcgccccgcaacctccccttctacgagcggctcggcttcaccgtcaccgccgacgtcgaggtgcccgaaggaccgcgcacctggtgcatgacccgcaagcccggtgcctga

SEQ ID NO: 22200 - DNA, 2985 bp, Artificial Sequence
  Synthetic Polynucleotide
atgaccatccggctgctgtgctatatgggcttctacttcctcggagccggcctgatggaagccgacatctaccagacacctagatacctggtcatcggcaccggcaagaaaatcaccctggaatgcagccagacaatgggccacgacaagatgtactggtatcagcaggaccccggcatggaactgcacctgatccactacagctacggcgtgaacagcaccgagaagggcgatctgtctagcgagagcaccgtgtccagaatcagaaccgagcacttcccactgacactggaaagcgccagacctagccacaccagccagtacctgtgtgcctcttctgaggccagaggactggccgagttcaccgacacacagtatttcggccctggcaccagactgaccgttctcgaggacctgaagaacgtgttcccacctgaggtggccgtgttcgagcctagcgaggccgagatcagccacacccagaaagccaccctcgtgtgcctggctaccggcttctaccccgaccatgtggaactgtcttggtgggtcaacggcaaagaggtgcacagcggcgtgtgtaccgacccccagccactgaaagaacagcccgccctgaacgacagccggtactgcctgagcagcagactgagagtgtccgccaccttctggcagaacccccggaaccacttcagatgccaggtgcagttctacggcctgagcgagaacgacgagtggacccaggacagagccaagcccgtgacccagatcgtgtctgccgaagcctggggcagagccgattgcggctttaccagcgagagctaccagcagggcgtgctgagcgccaccatcctgtacgagatcctgctgggcaaggccaccctgtacgccgtgctggtgtctgccctggtgctgatggctatggtcaagcggaaggacagccggggaagggccaagcgatctggatctggagcaacaaacttctcactactcaaacaagcaggtgacgtggaggagaatcccgggcctactagtgccaccatggactggatttggcgcatccttttccttgtcggcgctgctaccggcgcccattccgggccccaggttcagctgcaagagtctggcggaggacttgctcaagctggcggaagcctgagactgtcttgtgccgcctctggcagaaccttcagcatgggctggtttagacaggcccctggcaaagagagagagttcgtcgccgccatcacatacagcggcggcagcccttactacgcctcttctgtcagaggccggttcaccatcagccgggacaacgccaagaacaccgtgtacctccagatgaacagcctgaagccagaggacaccgccgtgtactactgtgccgccaatccaacctacggcagcgactggaatgccgagaattggggccagggcacccaagtgacagtgtctagtggatccggcggcggaggatctggcggaggcggatctgggggcggaggctctttcgaagcccagaccgtgacacagagccagcctgagatgtctgtgcaagaggccgagacagtgaccctgagctgcacctacgataccagcgagagcgactactacctgttctggtacaagcagcctcctagccggcagatgatcctggtcatccggcaagaagcctataagcagcagaacgccaccgagaacagattcagcgtgaacttccagaaggccgccaagagcttcagcctgaagatcagcgatagccagctgggcgacgccgccatgtacttttgcgcttatagaagcgccgtgaacgcccggctgatgtttggagatggcacacagctggtggtcaagcccaacacgcgtatccagaaccctgatcctgccgtgtaccagctgcgggatagcaagagcagcgacaagagcgtgtgtctgttcaccgacttcgacagccagaccaacgtgtcccagagcaaggactccgacgtgtacatcaccgataagtgcgtgctggacatgcggagcatggacttcaagagcaactccgccgtggcctggtccaacaagtccgatttcgcctgcgccaacgccttcaacaacagcattatccccgaggacacattcttcccaagccccgagagcagctgcgacgtgaagctggtggaaaagagcttcgagacagacaccaacctgaacttccagaacctgagcgtgatcggcttcagaatcctgctgctgaaagtggccggctttaacctgctgatgaccctgcggctgtggtccagccgcgccaagagaagcggatctggcgtgaagcagaccctgaatttcgacctgctgaagctggctggcgacgtggaatccaacccaggcccttctagaggccatatgaccgagtacaagcccacggtgcgcctcgccacccgcgacgacgtccccagggccgtacgcaccctcgccgccgcgttcgccgactaccccgccacgcgccacaccgtcgatccggaccgccacatcgagcgggtcaccgagctgcaagaactcttcctcacgcgcgtcgggctcgacatcggcaaggtgtgggtcgcggacgacggcgccgcggtggcggtctggaccacgccggagagcgtcgaagcgggggcggtgttcgccgagatcggcccgcgcatggccgagttgagcggttcccggctggccgcgcagcaacagatggaaggcctcctggcgccgcaccggcccaaggagcccgcgtggttcctggccaccgtcggcgtctcgcccgaccaccagggcaagggtctgggcagcgccgtcgtgctccccggagtggaggcggccgagcgcgccggggtgcccgccttcctggagacctccgcgccccgcaacctccccttctacgagcggctcggcttcaccgtcaccgccgacgtcgaggtgcccgaaggaccgcgcacctggtgcatgacccgcaagcccggtgcctga

SEQ ID NO: 22201 - DNA, 3468 bp, Artificial Sequence
  Synthetic Polynucleotide
atggccttaccagtgaccgccttgctcctgccgctggccttgctgctccacgccgccaggccggcatgcgaagtgcagctgcttgaaagtggcggcggactgattcagcctggcggatctctgagactgagctgtgccgccagcggcttcaccttttctagccacgccatgacctgggtccgacaggcacctggaaaagggcttgaatgggtgtccgccatcagcggctctggcgattacacacactacgccgacagcgtgaagggcagattcaccatcagcagagacaacagcaagaacaccgtgtacctccagatgaacagcctgagagccgaggacagcgccgtgtattattgcgccaaggatgaggatggcggcagcctgcttggacacagaggacaaggcaccctggtcaccgtttcttccggtaccggcggaggcggatctggcggcggaggtagcggtggcggaggatctgaattcgctggacatctggaacagccccagatcagcagcaccaagacactgagcaagaccgccagactggaatgcgtggtgtccggcatcacaatcagcgccacaagcgtgtactggtacagagaaagacccggcgaagtgatccagttcctggtgtccatcagctacgatggcaccgtgcggaaagagagcggcatcccttctggcaagttcgaggtggacagaatccccgagacaagcaccagcacactgaccatccacaacgtggaaaagcaggacattgccacctactactgcgccctgtgggaagcccaacaagagctgggcaagaaaatcaaggtgttcggccctggcaccaagctgattatcaccgacaagcagctggacaagcagctggacgccgacgtgtcccccaagcctaccatcttcctgccctctatcgccgagacaaagctccagaaggccggcacctacctgtgcctgctggaaaagttcttcccagatgtgattaagatccactggcaggaaaagaagtccaacaccatcctgggcagccaggaaggcaacaccatgaagaccaacgacacctacatgaagttcagctggctgaccgtgcccgagaagtccctggacaaagaacacagatgcatcgtgcggcacgaaaacaacaagaacggcgtggaccaggaaatcatcttcccacccatcaagaccgatgtgattacaatggaccccaaggacaactgctccaaggacgccaacgataccctgctgctccagctgaccaacaccagcgcctactacatgtacttgttgctgctgctgaagtccgtggtgtacttcgccatcatcacatgctgcctgctgcggagaaccgccttctgctgcaacggcgagaagtctagggccaagcgatctggatctggagcaacaaacttctcactactcaaacaagcaggtgacgtggaggagaatcccgggcctactagtgccaccatggactggatttggcgcatccttttccttgtcggcgctgctaccggcgcccattccgggccccaggttcagctgcaagagtctggcggaggacttgctcaagctggcggaagcctgagactgtcttgtgccgcctctggcagaaccttcagcatgggctggtttagacaggcccctggcaaagagagagagttcgtcgccgccatcacatacagcggcggcagcccttactacgcctcttctgtcagaggccggttcaccatcagccgggacaacgccaagaacaccgtgtacctccagatgaacagcctgaagccagaggacaccgccgtgtactactgtgccgccaatccaacctacggcagcgactggaatgccgagaattggggccagggcacccaagtgacagtgtctagtggatccggcggcggaggatctggcggaggcggatctgggggcggaggctctttcgaagccattgagctggtgcctgagcaccagaccgtgcctgtgtctattggagtgcccgccacactgcggtgtagcatgaagggcgaagccatcggcaactactacatcaactggtacagaaagacccagggcaacaccatgaccttcatctacagagagaaggacatctacggccctggcttcaaggacaacttccagggcgacatcgacattgccaagaacctggccgtgctgaagattctggcccctagcgagagagatgagggcagctactactgcgcctgtgacacacttggaatgggcggcgagtacaccgacaagctgatcttcggcaagggcaccagagtgaccgtggaacctagaagccagcctcacaccaagcccagcgtgttcgtgatgaagaacggcaccaacgtggcctgcctcgtgaaagagttctaccccaaggacatcaggatcaacctggtgtccagcaagaagatcaccgagttcgaccccgccatcgtgatctcccccagcggcaagtacaacgccgtgaagctggggaagtacgaggacagcaacagcgtgacctgctccgtgcagcacgacaacaagaccgtgcacagcaccgactttgaagtgaaaaccgactccaccgaccacgtgaagcccaaagagacagagaacaccaagcagcccagcaagagctgccacaagcccaaggccatcgtgcacaccgagaaagtgaacatgatgagcctgaccgtgctgggcctgcggatgctgttcgccaaaaccgtggccgtgaacttcctgctgaccgccaagctgttcttcctccgcgccaagagaagcggatctggcgtgaagcagaccctgaatttcgacctgctgaagctggctggcgacgtggaatccaacccaggcccttctagagcccatatgaccgagtacaagcccacggtgcgcctcgccacccgcgacgacgtccccagggccgtacgcaccctcgccgccgcgttcgccgactaccccgccacgcgccacaccgtcgatccggaccgccacatcgagcgggtcaccgagctgcaagaactcttcctcacgcgcgtcgggctcgacatcggcaaggtgtgggtcgcggacgacggcgccgcggtggcggtctggaccacgccggagagcgtcgaagcgggggcggtgttcgccgagatcggcccgcgcatggccgagttgagcggttcccggctggccgcgcagcaacagatggaaggcctcctggcgccgcaccggcccaaggagcccgcgtggttcctggccaccgtcggcgtctcgcccgaccaccagggcaagggtctgggcagcgccgtcgtgctccccggagtggaggcggccgagcgcgccggggtgcccgccttcctggagacctccgcgccccgcaacctccccttctacgagcggctcggcttcaccgtcaccgccgacgtcgaggtgcccgaaggaccgcgcacctggtgcatgacccgcaagcccggtgcctga

SEQ ID NO: 22202 - DNA, 3054 bp, Artificial Sequence
  Synthetic Polynucleotide
atggccttaccagtgaccgccttgctcctgccgctggccttgctgctccacgccgccaggccggcatgcgctggacatctggaacagccccagatcagcagcaccaagacactgagcaagaccgccagactggaatgcgtggtgtccggcatcacaatcagcgccacaagcgtgtactggtacagagaaagacccggcgaagtgatccagttcctggtgtccatcagctacgatggcaccgtgcggaaagagagcggcatcccttctggcaagttcgaggtggacagaatccccgagacaagcaccagcacactgaccatccacaacgtggaaaagcaggacattgccacctactactgcgccctgtgggaagcccaacaagagctgggcaagaaaatcaaggtgttcggccctggcaccaagctgattatcaccgacaagcagctggacaagcagctggacgccgacgtgtcccccaagcctaccatcttcctgccctctatcgccgagacaaagctccagaaggccggcacctacctgtgcctgctggaaaagttcttcccagatgtgattaagatccactggcaggaaaagaagtccaacaccatcctgggcagccaggaaggcaacaccatgaagaccaacgacacctacatgaagttcagctggctgaccgtgcccgagaagtccctggacaaagaacacagatgcatcgtgcggcacgaaaacaacaagaacggcgtggaccaggaaatcatcttcccacccatcaagaccgatgtgattacaatggaccccaaggacaactgctccaaggacgccaacgataccctgctgctccagctgaccaacaccagcgcctactacatgtacttgttgctgctgctgaagtccgtggtgtacttcgccatcatcacatgctgcctgctgcggagaaccgccttctgctgcaacggcgagaagtctagggccaagcgatctggatctggagcaacaaacttctcactactcaaacaagcaggtgacgtggaggagaatcccgggcctactagtgccaccatggactggatttggcgcatccttttccttgtcggcgctgctaccggcgcccattccgggccccaggttcagctgcaagagtctggcggaggacttgctcaagctggcggaagcctgagactgtcttgtgccgcctctggcagaaccttcagcatgggctggtttagacaggcccctggcaaagagagagagttcgtcgccgccatcacatacagcggcggcagcccttactacgcctcttctgtcagaggccggttcaccatcagccgggacaacgccaagaacaccgtgtacctccagatgaacagcctgaagccagaggacaccgccgtgtactactgtgccgccaatccaacctacggcagcgactggaatgccgagaattggggccagggcacccaagtgacagtgtctagtggatccggcggcggaggatctggcggaggcggatctgggggcggaggctctttcgaagccattgagctggtgcctgagcaccagaccgtgcctgtgtctattggagtgcccgccacactgcggtgtagcatgaagggcgaagccatcggcaactactacatcaactggtacagaaagacccagggcaacaccatgaccttcatctacagagagaaggacatctacggccctggcttcaaggacaacttccagggcgacatcgacattgccaagaacctggccgtgctgaagattctggcccctagcgagagagatgagggcagctactactgcgcctgtgacacacttggaatgggcggcgagtacaccgacaagctgatcttcggcaagggcaccagagtgaccgtggaacctagaagccagcctcacaccaagcccagcgtgttcgtgatgaagaacggcaccaacgtggcctgcctcgtgaaagagttctaccccaaggacatcaggatcaacctggtgtccagcaagaagatcaccgagttcgaccccgccatcgtgatctcccccagcggcaagtacaacgccgtgaagctggggaagtacgaggacagcaacagcgtgacctgctccgtgcagcacgacaacaagaccgtgcacagcaccgactttgaagtgaaaaccgactccaccgaccacgtgaagcccaaagagacagagaacaccaagcagcccagcaagagctgccacaagcccaaggccatcgtgcacaccgagaaagtgaacatgatgagcctgaccgtgctgggcctgcggatgctgttcgccaaaaccgtggccgtgaacttcctgctgaccgccaagctgttcttcctccgcgccaagagaagcggatctggcgtgaagcagaccctgaatttcgacctgctgaagctggctggcgacgtggaatccaacccaggcccttctagagcccatatgaccgagtacaagcccacggtgcgcctcgccacccgcgacgacgtccccagggccgtacgcaccctcgccgccgcgttcgccgactaccccgccacgcgccacaccgtcgatccggaccgccacatcgagcgggtcaccgagctgcaagaactcttcctcacgcgcgtcgggctcgacatcggcaaggtgtgggtcgcggacgacggcgccgcggtggcggtctggaccacgccggagagcgtcgaagcgggggcggtgttcgccgagatcggcccgcgcatggccgagttgagcggttcccggctggccgcgcagcaacagatggaaggcctcctggcgccgcaccggcccaaggagcccgcgtggttcctggccaccgtcggcgtctcgcccgaccaccagggcaagggtctgggcagcgccgtcgtgctccccggagtggaggcggccgagcgcgccggggtgcccgccttcctggagacctccgcgccccgcaacctccccttctacgagcggctcggcttcaccgtcaccgccgacgtcgaggtgcccgaaggaccgcgcacctggtgcatgacccgcaagcccggtgcctga

SEQ ID NO: 22203 - DNA, 3399 bp, Artificial Sequence
  Synthetic Polynucleotide
atggccttaccagtgaccgccttgctcctgccgctggccttgctgctccacgccgccaggccggcatgcgaagtgcagctgcttgaaagtggcggcggactgattcagcctggcggatctctgagactgagctgtgccgccagcggcttcaccttttctagccacgccatgacctgggtccgacaggcacctggaaaagggcttgaatgggtgtccgccatcagcggctctggcgattacacacactacgccgacagcgtgaagggcagattcaccatcagcagagacaacagcaagaacaccgtgtacctccagatgaacagcctgagagccgaggacagcgccgtgtattattgcgccaaggatgaggatggcggcagcctgcttggacacagaggacaaggcaccctggtcaccgtttcttccggtaccggcggaggcggatctggcggcggaggtagcggtggcggaggatctgaattcgacatccagatgacacagagccctagcagcctgtctgccagcgtgggagacagagtgaccatcacatgcaaggccagcgaccacatcaacaactggctggcctggtatcagcagaagcctggacaggcccctaagctgctgatctacggcgctaccacactggaaacaggcgtgcccagcagattttctggcagcggctctggcaccgactacaccctgacaatatccagcctccagcctgaggacttcgccacctactactgtcagcagagctggaacaccccttggacattcggccagggcaccaagctggaaatcaagagactcgaggacctgaagaacgtgttcccacctgaggtggccgtgttcgagcctagcaaggccgagatcgcccacacccagaaagccaccctcgtgtgcctggctaccggcttctaccccgaccatgtggaactgtcttggtgggtcaacggcaaagaggtgcacagcggcgtgtgtaccgacccccagccactgaaagaacagcccgccctgaacgacagccggtactgcctgagcagcagactgagagtgtccgccaccttctggcagaacccccggaaccacttcagatgccaggtgcagttctacggcctgagcgagaacgacgagtggacccaggacagagccaagcccgtgacccagatcgtgtctgccgaagcctggggcagagccgattgcggcatcaccagcgccagctaccaccagggcgtgctgagcgccaccatcctgtacgagatcctgctgggcaaggccaccctgtacgccgtgctggtgtctgccctggtgctgatggctatggtcaagcggaaggacagccggggaagggccaagcgatctggatctggagcaacaaacttctcactactcaaacaagcaggtgacgtggaggagaatcccgggcctactagtgccaccatggactggatttggcgcatccttttccttgtcggcgctgctaccggcgcccattccgggccccaggttcagctgcaagagtctggcggaggacttgctcaagctggcggaagcctgagactgtcttgtgccgcctctggcagaaccttcagcatgggctggtttagacaggcccctggcaaagagagagagttcgtcgccgccatcacatacagcggcggcagcccttactacgcctcttctgtcagaggccggttcaccatcagccgggacaacgccaagaacaccgtgtacctccagatgaacagcctgaagccagaggacaccgccgtgtactactgtgccgccaatccaacctacggcagcgactggaatgccgagaattggggccagggcacccaagtgacagtgtctagtggatccggcggcggaggatctggcggaggcggatctgggggcggaggctctttcgaagtgcagctggttgaatcaggtggcggcctggttcaacctggcggatctctgagactgagctgtgccgccagcggcttcaacatcaaggacacctacatccactgggtccgacaggcccctggcaaaggacttgaatgggtcgccagaatctaccccaccaacggctacaccagatacgccgactctgtgaagggcagattcaccatcagcgccgacaccagcaagaacaccgcctacctccagatgaactccctgagagccgaggacaccgccgtgtactactgtagcagatggggcggctggggcttctacgctatggattattggggccagggaaccctggtcaccgtgtcatctacgcgtatccagaaccctgatcctgccgtgtaccagctgcgggatagcaagagcagcgacaagagcgtgtgtctgttcaccgacttcgacagccagaccaacgtgtcccagagcaaggactccgacgtgtacatcaccgataagtgcgtgctggacatgcggagcatggacttcaagagcaactccgccgtggcctggtccaacaagtccgatttcgcctgcgccaacgccttcaacaacagcattatccccgaggacacattcttcccaagcagcgacgtgccctgcgacgtgaagctggtggaaaagagcttcgagacagacaccaacctgaacttccagaacctgagcgtgatcggcttcagaatcctgctgctgaaagtggccggctttaacctgctgatgaccctgcggctgtggtccagccgcgccaagagaagcggatctggcgtgaagcagaccctgaatttcgacctgctgaagctggctggcgacgtggaatccaacccaggcccttctagaggccatatgaccgagtacaagcccacggtgcgcctcgccacccgcgacgacgtccccagggccgtacgcaccctcgccgccgcgttcgccgactaccccgccacgcgccacaccgtcgatccggaccgccacatcgagcgggtcaccgagctgcaagaactcttcctcacgcgcgtcgggctcgacatcggcaaggtgtgggtcgcggacgacggcgccgcggtggcggtctggaccacgccggagagcgtcgaagcgggggcggtgttcgccgagatcggcccgcgcatggccgagttgagcggttcccggctggccgcgcagcaacagatggaaggcctcctggcgccgcaccggcccaaggagcccgcgtggttcctggccaccgtcggcgtctcgcccgaccaccagggcaagggtctgggcagcgccgtcgtgctccccggagtggaggcggccgagcgcgccggggtgcccgccttcctggagacctccgcgccccgcaacctccccttctacgagcggctcggcttcaccgtcaccgccgacgtcgaggtgcccgaaggaccgcgcacctggtgcatgacccgcaagcccggtgcctga

SEQ ID NO: 22204 - DNA, 2982 bp, Artificial Sequence
  Synthetic Polynucleotide
atggccttaccagtgaccgccttgctcctgccgctggccttgctgctccacgccgccaggccggacatccagatgacacagagccctagcagcctgtctgccagcgtgggagacagagtgaccatcacatgcaaggccagcgaccacatcaacaactggctggcctggtatcagcagaagcctggacaggcccctaagctgctgatctacggcgctaccacactggaaacaggcgtgcccagcagattttctggcagcggctctggcaccgactacaccctgacaatatccagcctccagcctgaggacttcgccacctactactgtcagcagagctggaacaccccttggacattcggccagggcaccaagctggaaatcaagagactcgagatccagaaccctgatcctgccgtgtaccagctgcgggatagcaagagcagcgacaagagcgtgtgtctgttcaccgacttcgacagccagaccaacgtgtcccagagcaaggactccgacgtgtacatcaccgataagtgcgtgctggacatgcggagcatggacttcaagagcaactccgccgtggcctggtccaacaagtccgatttcgcctgcgccaacgccttcaacaacagcattatccccgaggacacattcttcccaagcagcgacgtgccctgcgacgtgaagctggtggaaaagagcttcgagacagacaccaacctgaacttccagaacctgagcgtgatcggcttcagaatcctgctgctgaaagtggccggctttaacctgctgatgaccctgcggctgtggtccagccgcgccaagagaagcggatctggcgtgaagcagaccctgaatttcgacctgctgaagctggctggcgacgtggaatccaacccaggccctactagtgccaccatggactggatttggcgcatccttttccttgtcggcgctgctaccggcgcccattccgggccccaggttcagctgcaagagtctggcggaggacttgctcaagctggcggaagcctgagactgtcttgtgccgcctctggcagaaccttcagcatgggctggtttagacaggcccctggcaaagagagagagttcgtcgccgccatcacatacagcggcggcagcccttactacgcctcttctgtcagaggccggttcaccatcagccgggacaacgccaagaacaccgtgtacctccagatgaacagcctgaagccagaggacaccgccgtgtactactgtgccgccaatccaacctacggcagcgactggaatgccgagaattggggccagggcacccaagtgacagtgtctagtggatccggcggcggaggatctggcggaggcggatctgggggcggaggctctttcgaagtgcagctggttgaatcaggtggcggcctggttcaacctggcggatctctgagactgagctgtgccgccagcggcttcaacatcaaggacacctacatccactgggtccgacaggcccctggcaaaggacttgaatgggtcgccagaatctaccccaccaacggctacaccagatacgccgactctgtgaagggcagattcaccatcagcgccgacaccagcaagaacaccgcctacctccagatgaactccctgagagccgaggacaccgccgtgtactactgtagcagatggggcggctggggcttctacgctatggattattggggccagggaaccctggtcaccgtgtcatctacgcgtgaggacctgaagaacgtgttcccacctgaggtggccgtgttcgagcctagcaaggccgagatcgcccacacccagaaagccaccctcgtgtgcctggctaccggcttctaccccgaccatgtggaactgtcttggtgggtcaacggcaaagaggtgcacagcggcgtgtgtaccgacccccagccactgaaagaacagcccgccctgaacgacagccggtactgcctgagcagcagactgagagtgtccgccaccttctggcagaacccccggaaccacttcagatgccaggtgcagttctacggcctgagcgagaacgacgagtggacccaggacagagccaagcccgtgacccagatcgtgtctgccgaagcctggggcagagccgattgcggcatcaccagcgccagctaccaccagggcgtgctgagcgccaccatcctgtacgagatcctgctgggcaaggccaccctgtacgccgtgctggtgtctgccctggtgctgatggctatggtcaagcggaaggacagccggggaagggccaagcgatctggatctggagcaacaaacttctcactactcaaacaagcaggtgacgtggaggagaatcccgggccttctagaggccatatgaccgagtacaagcccacggtgcgcctcgccacccgcgacgacgtccccagggccgtacgcaccctcgccgccgcgttcgccgactaccccgccacgcgccacaccgtcgatccggaccgccacatcgagcgggtcaccgagctgcaagaactcttcctcacgcgcgtcgggctcgacatcggcaaggtgtgggtcgcggacgacggcgccgcggtggcggtctggaccacgccggagagcgtcgaagcgggggcggtgttcgccgagatcggcccgcgcatggccgagttgagcggttcccggctggccgcgcagcaacagatggaaggcctcctggcgccgcaccggcccaaggagcccgcgtggttcctggccaccgtcggcgtctcgcccgaccaccagggcaagggtctgggcagcgccgtcgtgctccccggagtggaggcggccgagcgcgccggggtgcccgccttcctggagacctccgcgccccgcaacctccccttctacgagcggctcggcttcaccgtcaccgccgacgtcgaggtgcccgaaggaccgcgcacctggtgcatgacccgcaagcccggtgcctga

SEQ ID NO: 22205 - DNA, 3003 bp, Artificial Sequence
  Synthetic Polynucleotide
atgaccatccggctgctgtgctatatgggcttctacttcctcggagccggcctgatggaagccgacatctaccagacacctagatacctggtcatcggcaccggcaagaaaatcaccctggaatgcagccagacaatgggccacgacaagatgtactggtatcagcaggaccccggcatggaactgcacctgatccactacagctacggcgtgaacagcaccgagaagggcgatctgtctagcgagagcaccgtgtccagaatcagaaccgagcacttcccactgacactggaaagcgccagacctagccacaccagccagtacctgtgtgcctcttctgaggccagaggactggccgagttcaccgacacacagtatttcggccctggcaccagactgaccgttctcgaggacctgaagaacgtgttcccacctgaggtggccgtgttcgagcctagcgaggccgagatcagccacacccagaaagccaccctcgtgtgcctggctaccggcttctaccccgaccatgtggaactgtcttggtgggtcaacggcaaagaggtgcacagcggcgtgtgtaccgacccccagccactgaaagaacagcccgccctgaacgacagccggtactgcctgagcagcagactgagagtgtccgccaccttctggcagaacccccggaaccacttcagatgccaggtgcagttctacggcctgagcgagaacgacgagtggacccaggacagagccaagcccgtgacccagatcgtgtctgccgaagcctggggcagagccgattgcggctttaccagcgagagctaccagcagggcgtgctgagcgccaccatcctgtacgagatcctgctgggcaaggccaccctgtacgccgtgctggtgtctgccctggtgctgatggctatggtcaagcggaaggacagccggggaagggccaagcgatctggatctggagcaacaaacttctcactactcaaacaagcaggtgacgtggaggagaatcccgggcctactagtgccaccatggactggatttggcgcatccttttccttgtcggcgctgctaccggcgcccattccgggccccaggttcagctgcaagagtctggcggaggacttgctcaagctggcggaagcctgagactgtcttgtgccgcctctggcagaaccttcagcatgggctggtttagacaggcccctggcaaagagagagagttcgtcgccgccatcacatacagcggcggcagcccttactacgcctcttctgtcagaggccggttcaccatcagccgggacaacgccaagaacaccgtgtacctccagatgaacagcctgaagccagaggacaccgccgtgtactactgtgccgccaatccaacctacggcagcgactggaatgccgagaattggggccagggcacccaagtgacagtgtctagtggatccggcggcggaggatctggcggaggcggatctgggggcggaggctctttcgaacaagttcagcttcaacagcctggcgctgagctggtcaaacctggcgcttctgtgaagatgagctgcaaagccagcggctacgccttcagcagctactggatcaactggatgaagcagaaacccggccagggactcgaatggatcggccaaatctatcccggcgacggcgacaccaactacaacggcaagttcaagggcagagccacactgaccgccgatacctctagcagcacagcctacatgcagctgagcagcctgaccagcgaagatagcgccgtgtacttctgtgcccggtccatcacaacagtcgtgggctgcgctatggactattggggccagggaacaagcgtgaccgtgtctagtacgcgtatccagaaccctgatcctgccgtgtaccagctgcgggatagcaagagcagcgacaagagcgtgtgtctgttcaccgacttcgacagccagaccaacgtgtcccagagcaaggactccgacgtgtacatcaccgataagtgcgtgctggacatgcggagcatggacttcaagagcaactccgccgtggcctggtccaacaagtccgatttcgcctgcgccaacgccttcaacaacagcattatccccgaggacacattcttcccaagccccgagagcagctgcgacgtgaagctggtggaaaagagcttcgagacagacaccaacctgaacttccagaacctgagcgtgatcggcttcagaatcctgctgctgaaagtggccggctttaacctgctgatgaccctgcggctgtggtccagccgcgccaagagaagcggatctggcgtgaagcagaccctgaatttcgacctgctgaagctggctggcgacgtggaatccaacccaggcccttctagaggccatatgaccgagtacaagcccacggtgcgcctcgccacccgcgacgacgtccccagggccgtacgcaccctcgccgccgcgttcgccgactaccccgccacgcgccacaccgtcgatccggaccgccacatcgagcgggtcaccgagctgcaagaactcttcctcacgcgcgtcgggctcgacatcggcaaggtgtgggtcgcggacgacggcgccgcggtggcggtctggaccacgccggagagcgtcgaagcgggggcggtgttcgccgagatcggcccgcgcatggccgagttgagcggttcccggctggccgcgcagcaacagatggaaggcctcctggcgccgcaccggcccaaggagcccgcgtggttcctggccaccgtcggcgtctcgcccgaccaccagggcaagggtctgggcagcgccgtcgtgctccccggagtggaggcggccgagcgcgccggggtgcccgccttcctggagacctccgcgccccgcaacctccccttctacgagcggctcggcttcaccgtcaccgccgacgtcgaggtgcccgaaggaccgcgcacctggtgcatgacccgcaagcccggtgcctga

SEQ ID NO: 22206 - DNA, 3372 bp, Artificial Sequence
  Synthetic Polynucleotide
atggccttaccagtgaccgccttgctcctgccgctggccttgctgctccacgccgccaggccggcatgcgaagtgcagctgcttgaaagtggcggcggactgattcagcctggcggatctctgagactgagctgtgccgccagcggcttcaccttttctagccacgccatgacctgggtccgacaggcacctggaaaagggcttgaatgggtgtccgccatcagcggctctggcgattacacacactacgccgacagcgtgaagggcagattcaccatcagcagagacaacagcaagaacaccgtgtacctccagatgaacagcctgagagccgaggacagcgccgtgtattattgcgccaaggatgaggatggcggcagcctgcttggacacagaggacaaggcaccctggtcaccgtttcttccggtaccggcggaggcggatctggcggcggaggtagcggtggcggaggatctgaattcgacatccagatgacacagagccctagcagcctgtctgccagcgtgggagacagagtgaccatcacatgcaaggccagcgaccacatcaacaactggctggcctggtatcagcagaagcctggacaggcccctaagctgctgatctacggcgctaccacactggaaacaggcgtgcccagcagattttctggcagcggctctggcaccgactacaccctgacaatatccagcctccagcctgaggacttcgccacctactactgtcagcagagctggaacaccccttggacattcggccagggcaccaagctggaaatcaagagactcgaggacctgaagaacgtgttcccacctgaggtggccgtgttcgagcctagcgaggccgagatcagccacacccagaaagccaccctcgtgtgcctggctaccggcttctaccccgaccatgtggaactgtcttggtgggtcaacggcaaagaggtgcacagcggcgtgtgtaccgacccccagccactgaaagaacagcccgccctgaacgacagccggtactgcctgagcagcagactgagagtgtccgccaccttctggcagaacccccggaaccacttcagatgccaggtgcagttctacggcctgagcgagaacgacgagtggacccaggacagagccaagcccgtgacccagatcgtgtctgccgaagcctggggcagagccgattgcggctttaccagcgagagctaccagcagggcgtgctgagcgccaccatcctgtacgagatcctgctgggcaaggccaccctgtacgccgtgctggtgtctgccctggtgctgatggctatggtcaagcggaaggacagccggggaagggccaagcgatctggatctggagcaacaaacttctcactactcaaacaagcaggtgacgtggaggagaatcccgggcctactagtgccaccatggactggatttggcgcatccttttccttgtcggcgctgctaccggcgcccattccgggcccgaagtgcagctggttgaatctggcggaggactggttcaggctggcggatctctgagactgtcttgtgccgccagcggcagaacctttagcatgggctggtttagacaggcccctggcaaagagagagagttcgtcgccgccatcacatactctggcggcagcccttactacgccgactctgtgaagggcagattcaccatcagccgggacaacgccaagaacaccgtgtacctccagatgaacagcctgaagcctgaggacaccgccgtgtactactgcgccgccaatccaacatacggcagcgactggaacgccgagaattggggccagggaacccaagtgacagtgtctagcggatccggcggcggaggatctggcggaggcggatctgggggcggaggctctttcgaacagaaagaggtcgagcagaatagcggccctctgagcgttccagaaggcgctatcgccagcctgaactgcacctacagcgatagaggcagccagagcttcttctggtacagacagtacagcggcaagagccccgagctgattatgagcatctacagcaacggcgacaaagaggacggcagattcacagcccagctgaacaaggccagccagtacgtgtccctgctgatccgggatagccagcctagcgattctgccacctatctgtgcgccgtgaatagccagagcggcgtggccctgaattttggcaagggcacaagcctgctggtcacccctcatatccagaaccctgatcctgccgtgtaccagctgcgggatagcaagagcagcgacaagagcgtgtgtctgttcaccgacttcgacagccagaccaacgtgtcccagagcaaggactccgacgtgtacatcaccgataagtgcgtgctggacatgcggagcatggacttcaagagcaactccgccgtggcctggtccaacaagtccgatttcgcctgcgccaacgccttcaacaacagcattatccccgaggacacattcttcccaagccccgagagcagctgcgacgtgaagctggtggaaaagagcttcgagacagacaccaacctgaacttccagaacctgagcgtgatcggcttcagaatcctgctgctgaaagtggccggctttaacctgctgatgaccctgcggctgtggtccagccgcgccaagagaagcggatctggcgtgaagcagaccctgaatttcgacctgctgaagctggctggcgacgtggaatccaacccaggcccttctagaggccatatgaccgagtacaagcccacggtgcgcctcgccacccgcgacgacgtccccagggccgtacgcaccctcgccgccgcgttcgccgactaccccgccacgcgccacaccgtcgatccggaccgccacatcgagcgggtcaccgagctgcaagaactcttcctcacgcgcgtcgggctcgacatcggcaaggtgtgggtcgcggacgacggcgccgcggtggcggtctggaccacgccggagagcgtcgaagcgggggcggtgttcgccgagatcggcccgcgcatggccgagttgagcggttcccggctggccgcgcagcaacagatggaaggcctcctggcgccgcaccggcccaaggagcccgcgtggttcctggccaccgtcggcgtctcgcccgaccaccagggcaagggtctgggcagcgccgtcgtgctccccggagtggaggcggccgagcgcgccggggtgcccgccttcctggagacctccgcgccccgcaacctccccttctacgagcggctcggcttcaccgtcaccgccgacgtcgaggtgcccgaaggaccgcgcacctggtgcatgacccgcaagcccggtgcctga

SEQ ID NO: 22207 - DNA, 2592 bp, Artificial Sequence
  Synthetic Polynucleotide
atggccttaccagtgaccgccttgctcctgccgctggccttgctgctccacgccgccaggccggacatccagatgacacagagccctagcagcctgtctgccagcgtgggagacagagtgaccatcacatgcaaggccagcgaccacatcaacaactggctggcctggtatcagcagaagcctggacaggcccctaagctgctgatctacggcgctaccacactggaaacaggcgtgcccagcagattttctggcagcggctctggcaccgactacaccctgacaatatccagcctccagcctgaggacttcgccacctactactgtcagcagagctggaacaccccttggacattcggccagggcaccaagctggaaatcaagagactcgagggacagcctaaggccaatcctaccgtgacactgttccctccaagcagcgaagaactccaggccaacaaggccacacttgtgtgcctgatctccgacttctaccctggggctgtgacagtggcttggaaggccgatggatctcctgtgaaagccggcgtggaaaccaccaagccatccaagcagagcaacaacaaatacgccgccagctcctacctgagcctgacacctgagcagtggaagtcccacagatcctacagctgccaagtgacccacgaaggcagcaccgtggaaaagacagtggcccctacagagtgcagccccatcaagaccgatgtgattacaatggaccccaaggacaactgctccaaggacgccaacgataccctgctgctccagctgaccaacaccagcgcctactacatgtacttgttgctgctgctgaagtccgtggtgtacttcgccatcatcacatgctgcctgctgcggagaaccgccttctgctgcaacggcgagaagtctagggccaagcgatctggatctggagcaacaaacttctcactactcaaacaagcaggtgacgtggaggagaatcccgggcctactagtatggactggatttggcgcatccttttccttgtcggcgctgctaccggcgcgcattccttcgaacaagttcagcttcaacagcctggcgctgagctggtcaaacctggcgcttctgtgaagatgagctgcaaagccagcggctacgccttcagcagctactggatcaactggatgaagcagaaacccggccagggactcgaatggatcggccaaatctatcccggcgacggcgacaccaactacaacggcaagttcaagggcagagccacactgaccgccgatacctctagcagcacagcctacatgcagctgagcagcctgaccagcgaagatagcgccgtgtacttctgtgcccggtccatcacaacagtcgtgggctgcgctatggactattggggccagggaacaagcgtgaccgtgtctagtacgcgtagccagcctcacaccaagcccagcgtgttcgtgatgaagaacggcaccaacgtggcctgcctcgtgaaagagttctaccccaaggacatcaggatcaacctggtgtccagcaagaagatcaccgagttcgaccccgccatcgtgatctcccccagcggcaagtacaacgccgtgaagctggggaagtacgaggacagcaacagcgtgacctgctccgtgcagcacgacaacaagaccgtgcacagcaccgactttgaagtgaaaaccgactccaccgaccacgtgaagcccaaagagacagagaacaccaagcagcccagcaagagctgccacaagcccaaggccatcgtgcacaccgagaaagtgaacatgatgagcctgaccgtgctgggcctgcggatgctgttcgccaaaaccgtggccgtgaacttcctgctgaccgccaagctgttcttcctccgcgccaagagaagcggatctggcgtgaagcagaccctgaatttcgacctgctgaagctggctggcgacgtggaatccaacccaggcccttctagaggccatatgaccgagtacaagcccacggtgcgcctcgccacccgcgacgacgtccccagggccgtacgcaccctcgccgccgcgttcgccgactaccccgccacgcgccacaccgtcgatccggaccgccacatcgagcgggtcaccgagctgcaagaactcttcctcacgcgcgtcgggctcgacatcggcaaggtgtgggtcgcggacgacggcgccgcggtggcggtctggaccacgccggagagcgtcgaagcgggggcggtgttcgccgagatcggcccgcgcatggccgagttgagcggttcccggctggccgcgcagcaacagatggaaggcctcctggcgccgcaccggcccaaggagcccgcgtggttcctggccaccgtcggcgtctcgcccgaccaccagggcaagggtctgggcagcgccgtcgtgctccccggagtggaggcggccgagcgcgccggggtgcccgccttcctggagacctccgcgccccgcaacctccccttctacgagcggctcggcttcaccgtcaccgccgacgtcgaggtgcccgaaggaccgcgcacctggtgcatgacccgcaagcccggtgcctga

SEQ ID NO: 22208 - DNA, 27 bp, Artificial Sequence
  Synthetic Polynucleotide
ggggggggggggggggggggggggggg

SEQ ID NO: 22209 - DNA, 3120 bp, Artificial Sequence
  Synthetic Polynucleotide
atggccttaccagtgaccgccttgctcctgccgctggccttgctgctccacgccgccaggccggcatgcccctacatcaacatctacaacgccgagcctgccaatcctagcgagaagaacagccccacacagtacgcctacggtaccggcggaggcggatctggcggcggaggtagcggtggcggaggatctgaattcgacatccagatgacacagagccctagcagcctgtctgccagcgtgggagacagagtgaccatcacatgcaaggccagcgaccacatcaacaactggctggcctggtatcagcagaagcctggacaggcccctaagctgctgatctacggcgctaccacactggaaacaggcgtgcccagcagattttctggcagcggctctggcaccgactacaccctgacaatatccagcctccagcctgaggacttcgccacctactactgtcagcagagctggaacaccccttggacattcggccagggcaccaagctggaaatcaagagactcgaggacctgaagaacgtgttcccacctgaggtggccgtgttcgagcctagcaaggccgagatcgcccacacccagaaagccaccctcgtgtgcctggctaccggcttctaccccgaccatgtggaactgtcttggtgggtcaacggcaaagaggtgcacagcggcgtgtgtaccgacccccagccactgaaagaacagcccgccctgaacgacagccggtactgcctgagcagcagactgagagtgtccgccaccttctggcagaacccccggaaccacttcagatgccaggtgcagttctacggcctgagcgagaacgacgagtggacccaggacagagccaagcccgtgacccagatcgtgtctgccgaagcctggggcagagccgattgcggcatcaccagcgccagctaccaccagggcgtgctgagcgccaccatcctgtacgagatcctgctgggcaaggccaccctgtacgccgtgctggtgtctgccctggtgctgatggctatggtcaagcggaaggacagccggggaagggccaagcgatctggatctggagcaacaaacttctcactactcaaacaagcaggtgacgtggaggagaatcccgggcctactagtgccaccatggactggatttggcgcatccttttccttgtcggcgctgctaccggcgcccattccgggccccaggttcagctgcaagagtctggcggaggacttgctcaagctggcggaagcctgagactgtcttgtgccgcctctggcagaaccttcagcatgggctggtttagacaggcccctggcaaagagagagagttcgtcgccgccatcacatacagcggcggcagcccttactacgcctcttctgtcagaggccggttcaccatcagccgggacaacgccaagaacaccgtgtacctccagatgaacagcctgaagccagaggacaccgccgtgtactactgtgccgccaatccaacctacggcagcgactggaatgccgagaattggggccagggcacccaagtgacagtgtctagtggatccggcggcggaggatctggcggaggcggatctgggggcggaggctctttcgaacaagttcagcttcaacagcctggcgctgagctggtcaaacctggcgcttctgtgaagatgagctgcaaagccagcggctacgccttcagcagctactggatcaactggatgaagcagaaacccggccagggactcgaatggatcggccaaatctatcccggcgacggcgacaccaactacaacggcaagttcaagggcagagccacactgaccgccgatacctctagcagcacagcctacatgcagctgagcagcctgaccagcgaagatagcgccgtgtacttctgtgcccggtccatcacaacagtcgtgggctgcgctatggactattggggccagggaacaagcgtgaccgtgtctagtacgcgtatccagaaccctgatcctgccgtgtaccagctgcgggatagcaagagcagcgacaagagcgtgtgtctgttcaccgacttcgacagccagaccaacgtgtcccagagcaaggactccgacgtgtacatcaccgataagtgcgtgctggacatgcggagcatggacttcaagagcaactccgccgtggcctggtccaacaagtccgatttcgcctgcgccaacgccttcaacaacagcattatccccgaggacacattcttcccaagcagcgacgtgccctgcgacgtgaagctggtggaaaagagcttcgagacagacaccaacctgaacttccagaacctgagcgtgatcggcttcagaatcctgctgctgaaagtggccggctttaacctgctgatgaccctgcggctgtggtccagccgcgccaagagaagcggatctggcgtgaagcagaccctgaatttcgacctgctgaagctggctggcgacgtggaatccaacccaggcccttctagaggccatatgaccgagtacaagcccacggtgcgcctcgccacccgcgacgacgtccccagggccgtacgcaccctcgccgccgcgttcgccgactaccccgccacgcgccacaccgtcgatccggaccgccacatcgagcgggtcaccgagctgcaagaactcttcctcacgcgcgtcgggctcgacatcggcaaggtgtgggtcgcggacgacggcgccgcggtggcggtctggaccacgccggagagcgtcgaagcgggggcggtgttcgccgagatcggcccgcgcatggccgagttgagcggttcccggctggccgcgcagcaacagatggaaggcctcctggcgccgcaccggcccaaggagcccgcgtggttcctggccaccgtcggcgtctcgcccgaccaccagggcaagggtctgggcagcgccgtcgtgctccccggagtggaggcggccgagcgcgccggggtgcccgccttcctggagacctccgcgccccgcaacctccccttctacgagcggctcggcttcaccgtcaccgccgacgtcgaggtgcccgaaggaccgcgcacctggtgcatgacccgcaagcccggtgcctga

SEQ ID NO: 22210 - DNA, 3087 bp, Artificial Sequence
  Synthetic Polynucleotide
atggccttaccagtgaccgccttgctcctgccgctggccttgctgctccacgccgccaggccggcatgcccccagcttggtccgtatgagctttgggaattgagccacggtaccggcggaggcggatctggcggcggaggtagcggtggcggaggatctgaattcgacatccagatgacacagagccctagcagcctgtctgccagcgtgggagacagagtgaccatcacatgcaaggccagcgaccacatcaacaactggctggcctggtatcagcagaagcctggacaggcccctaagctgctgatctacggcgctaccacactggaaacaggcgtgcccagcagattttctggcagcggctctggcaccgactacaccctgacaatatccagcctccagcctgaggacttcgccacctactactgtcagcagagctggaacaccccttggacattcggccagggcaccaagctggaaatcaagagactcgaggacctgaagaacgtgttcccacctgaggtggccgtgttcgagcctagcaaggccgagatcgcccacacccagaaagccaccctcgtgtgcctggctaccggcttctaccccgaccatgtggaactgtcttggtgggtcaacggcaaagaggtgcacagcggcgtgtgtaccgacccccagccactgaaagaacagcccgccctgaacgacagccggtactgcctgagcagcagactgagagtgtccgccaccttctggcagaacccccggaaccacttcagatgccaggtgcagttctacggcctgagcgagaacgacgagtggacccaggacagagccaagcccgtgacccagatcgtgtctgccgaagcctggggcagagccgattgcggcatcaccagcgccagctaccaccagggcgtgctgagcgccaccatcctgtacgagatcctgctgggcaaggccaccctgtacgccgtgctggtgtctgccctggtgctgatggctatggtcaagcggaaggacagccggggaagggccaagcgatctggatctggagcaacaaacttctcactactcaaacaagcaggtgacgtggaggagaatcccgggcctactagtgccaccatggactggatttggcgcatccttttccttgtcggcgctgctaccggcgcccattccgggccccaggttcagctgcaagagtctggcggaggacttgctcaagctggcggaagcctgagactgtcttgtgccgcctctggcagaaccttcagcatgggctggtttagacaggcccctggcaaagagagagagttcgtcgccgccatcacatacagcggcggcagcccttactacgcctcttctgtcagaggccggttcaccatcagccgggacaacgccaagaacaccgtgtacctccagatgaacagcctgaagccagaggacaccgccgtgtactactgtgccgccaatccaacctacggcagcgactggaatgccgagaattggggccagggcacccaagtgacagtgtctagtggatccggcggcggaggatctggcggaggcggatctgggggcggaggctctttcgaacaagttcagcttcaacagcctggcgctgagctggtcaaacctggcgcttctgtgaagatgagctgcaaagccagcggctacgccttcagcagctactggatcaactggatgaagcagaaacccggccagggactcgaatggatcggccaaatctatcccggcgacggcgacaccaactacaacggcaagttcaagggcagagccacactgaccgccgatacctctagcagcacagcctacatgcagctgagcagcctgaccagcgaagatagcgccgtgtacttctgtgcccggtccatcacaacagtcgtgggctgcgctatggactattggggccagggaacaagcgtgaccgtgtctagtacgcgtatccagaaccctgatcctgccgtgtaccagctgcgggatagcaagagcagcgacaagagcgtgtgtctgttcaccgacttcgacagccagaccaacgtgtcccagagcaaggactccgacgtgtacatcaccgataagtgcgtgctggacatgcggagcatggacttcaagagcaactccgccgtggcctggtccaacaagtccgatttcgcctgcgccaacgccttcaacaacagcattatccccgaggacacattcttcccaagcagcgacgtgccctgcgacgtgaagctggtggaaaagagcttcgagacagacaccaacctgaacttccagaacctgagcgtgatcggcttcagaatcctgctgctgaaagtggccggctttaacctgctgatgaccctgcggctgtggtccagccgcgccaagagaagcggatctggcgtgaagcagaccctgaatttcgacctgctgaagctggctggcgacgtggaatccaacccaggcccttctagaggccatatgaccgagtacaagcccacggtgcgcctcgccacccgcgacgacgtccccagggccgtacgcaccctcgccgccgcgttcgccgactaccccgccacgcgccacaccgtcgatccggaccgccacatcgagcgggtcaccgagctgcaagaactcttcctcacgcgcgtcgggctcgacatcggcaaggtgtgggtcgcggacgacggcgccgcggtggcggtctggaccacgccggagagcgtcgaagcgggggcggtgttcgccgagatcggcccgcgcatggccgagttgagcggttcccggctggccgcgcagcaacagatggaaggcctcctggcgccgcaccggcccaaggagcccgcgtggttcctggccaccgtcggcgtctcgcccgaccaccagggcaagggtctgggcagcgccgtcgtgctccccggagtggaggcggccgagcgcgccggggtgcccgccttcctggagacctccgcgccccgcaacctccccttctacgagcggctcggcttcaccgtcaccgccgacgtcgaggtgcccgaaggaccgcgcacctggtgcatgacccgcaagcccggtgcctga

SEQ ID NO: 22211 - DNA, 2667 bp, Artificial Sequence
  Synthetic Polynucleotide
atggccttaccagtgaccgccttgctcctgccgctggccttgctgctccacgccgccaggccggacatccagatgacacagagccctagcagcctgtctgccagcgtgggagacagagtgaccatcacatgcaaggccagcgaccacatcaacaactggctggcctggtatcagcagaagcctggacaggcccctaagctgctgatctacggcgctaccacactggaaacaggcgtgcccagcagattttctggcagcggctctggcaccgactacaccctgacaatatccagcctccagcctgaggacttcgccacctactactgtcagcagagctggaacaccccttggacattcggccagggcaccaagctggaaatcaagagactcgaggacctgaagaacgtgttcccacctgaggtggccgtgttcgagcctagcgaggccgagatcagccacacccagaaagccaccctcgtgtgcctggctaccggcttctaccccgaccatgtggaactgtcttggtgggtcaacggcaaagaggtgcacagcggcgtgtgtaccgacccccagccactgaaagaacagcccgccctgaacgacagccggtactgcctgagcagcagactgagagtgtccgccaccttctggcagaacccccggaaccacttcagatgccaggtgcagttctacggcctgagcgagaacgacgagtggacccaggacagagccaagcccgtgacccagatcgtgtctgccgaagcctggggcagagccgattgcggctttaccagcgagagctaccagcagggcgtgctgagcgccaccatcctgtacgagatcctgctgggcaaggccaccctgtacgccgtgctggtgtctgccctggtgctgatggctatggtcaagcggaaggacagccggggaagggccaagcgatctggatctggagcaacaaacttctcactactcaaacaagcaggtgacgtggaggagaatcccgggcctactagtgccaccatggactggatttggcgcatccttttccttgtcggcgctgctaccggcgcccattccgggccccagcttggtccgtatgagctttgggaattgagccacggatccggcggcggaggatctggcggaggcggatctgggggcggaggctctttcgaacaagttcagcttcaacagcctggcgctgagctggtcaaacctggcgcttctgtgaagatgagctgcaaagccagcggctacgccttcagcagctactggatcaactggatgaagcagaaacccggccagggactcgaatggatcggccaaatctatcccggcgacggcgacaccaactacaacggcaagttcaagggcagagccacactgaccgccgatacctctagcagcacagcctacatgcagctgagcagcctgaccagcgaagatagcgccgtgtacttctgtgcccggtccatcacaacagtcgtgggctgcgctatggactattggggccagggaacaagcgtgaccgtgtctagtacgcgtatccagaaccctgatcctgccgtgtaccagctgcgggatagcaagagcagcgacaagagcgtgtgtctgttcaccgacttcgacagccagaccaacgtgtcccagagcaaggactccgacgtgtacatcaccgataagtgcgtgctggacatgcggagcatggacttcaagagcaactccgccgtggcctggtccaacaagtccgatttcgcctgcgccaacgccttcaacaacagcattatccccgaggacacattcttcccaagccccgagagcagctgcgacgtgaagctggtggaaaagagcttcgagacagacaccaacctgaacttccagaacctgagcgtgatcggcttcagaatcctgctgctgaaagtggccggctttaacctgctgatgaccctgcggctgtggtccagccgcgccaagagaagcggatctggcgtgaagcagaccctgaatttcgacctgctgaagctggctggcgacgtggaatccaacccaggcccttctagaggccatatgaccgagtacaagcccacggtgcgcctcgccacccgcgacgacgtccccagggccgtacgcaccctcgccgccgcgttcgccgactaccccgccacgcgccacaccgtcgatccggaccgccacatcgagcgggtcaccgagctgcaagaactcttcctcacgcgcgtcgggctcgacatcggcaaggtgtgggtcgcggacgacggcgccgcggtggcggtctggaccacgccggagagcgtcgaagcgggggcggtgttcgccgagatcggcccgcgcatggccgagttgagcggttcccggctggccgcgcagcaacagatggaaggcctcctggcgccgcaccggcccaaggagcccgcgtggttcctggccaccgtcggcgtctcgcccgaccaccagggcaagggtctgggcagcgccgtcgtgctccccggagtggaggcggccgagcgcgccggggtgcccgccttcctggagacctccgcgccccgcaacctccccttctacgagcggctcggcttcaccgtcaccgccgacgtcgaggtgcccgaaggaccgcgcacctggtgcatgacccgcaagcccggtgcctga

SEQ ID NO: 22212 - DNA, 3084 bp, Artificial Sequence
  Synthetic Polynucleotide
atggccttaccagtgaccgccttgctcctgccgctggccttgctgctccacgccgccaggccggcatgcagcgcctgtccatattcaaatccgtcactttgctctggtaccggcggaggcggatctggcggcggaggtagcggtggcggaggatctgaattcgacatccagatgacacagagccctagcagcctgtctgccagcgtgggagacagagtgaccatcacatgcaaggccagcgaccacatcaacaactggctggcctggtatcagcagaagcctggacaggcccctaagctgctgatctacggcgctaccacactggaaacaggcgtgcccagcagattttctggcagcggctctggcaccgactacaccctgacaatatccagcctccagcctgaggacttcgccacctactactgtcagcagagctggaacaccccttggacattcggccagggcaccaagctggaaatcaagagactcgaggacctgaagaacgtgttcccacctgaggtggccgtgttcgagcctagcaaggccgagatcgcccacacccagaaagccaccctcgtgtgcctggctaccggcttctaccccgaccatgtggaactgtcttggtgggtcaacggcaaagaggtgcacagcggcgtgtgtaccgacccccagccactgaaagaacagcccgccctgaacgacagccggtactgcctgagcagcagactgagagtgtccgccaccttctggcagaacccccggaaccacttcagatgccaggtgcagttctacggcctgagcgagaacgacgagtggacccaggacagagccaagcccgtgacccagatcgtgtctgccgaagcctggggcagagccgattgcggcatcaccagcgccagctaccaccagggcgtgctgagcgccaccatcctgtacgagatcctgctgggcaaggccaccctgtacgccgtgctggtgtctgccctggtgctgatggctatggtcaagcggaaggacagccggggaagggccaagcgatctggatctggagcaacaaacttctcactactcaaacaagcaggtgacgtggaggagaatcccgggcctactagtgccaccatggactggatttggcgcatccttttccttgtcggcgctgctaccggcgcccattccgggccccaggttcagctgcaagagtctggcggaggacttgctcaagctggcggaagcctgagactgtcttgtgccgcctctggcagaaccttcagcatgggctggtttagacaggcccctggcaaagagagagagttcgtcgccgccatcacatacagcggcggcagcccttactacgcctcttctgtcagaggccggttcaccatcagccgggacaacgccaagaacaccgtgtacctccagatgaacagcctgaagccagaggacaccgccgtgtactactgtgccgccaatccaacctacggcagcgactggaatgccgagaattggggccagggcacccaagtgacagtgtctagtggatccggcggcggaggatctggcggaggcggatctgggggcggaggctctttcgaacaagttcagcttcaacagcctggcgctgagctggtcaaacctggcgcttctgtgaagatgagctgcaaagccagcggctacgccttcagcagctactggatcaactggatgaagcagaaacccggccagggactcgaatggatcggccaaatctatcccggcgacggcgacaccaactacaacggcaagttcaagggcagagccacactgaccgccgatacctctagcagcacagcctacatgcagctgagcagcctgaccagcgaagatagcgccgtgtacttctgtgcccggtccatcacaacagtcgtgggctgcgctatggactattggggccagggaacaagcgtgaccgtgtctagtacgcgtatccagaaccctgatcctgccgtgtaccagctgcgggatagcaagagcagcgacaagagcgtgtgtctgttcaccgacttcgacagccagaccaacgtgtcccagagcaaggactccgacgtgtacatcaccgataagtgcgtgctggacatgcggagcatggacttcaagagcaactccgccgtggcctggtccaacaagtccgatttcgcctgcgccaacgccttcaacaacagcattatccccgaggacacattcttcccaagcagcgacgtgccctgcgacgtgaagctggtggaaaagagcttcgagacagacaccaacctgaacttccagaacctgagcgtgatcggcttcagaatcctgctgctgaaagtggccggctttaacctgctgatgaccctgcggctgtggtccagccgcgccaagagaagcggatctggcgtgaagcagaccctgaatttcgacctgctgaagctggctggcgacgtggaatccaacccaggcccttctagaggccatatgaccgagtacaagcccacggtgcgcctcgccacccgcgacgacgtccccagggccgtacgcaccctcgccgccgcgttcgccgactaccccgccacgcgccacaccgtcgatccggaccgccacatcgagcgggtcaccgagctgcaagaactcttcctcacgcgcgtcgggctcgacatcggcaaggtgtgggtcgcggacgacggcgccgcggtggcggtctggaccacgccggagagcgtcgaagcgggggcggtgttcgccgagatcggcccgcgcatggccgagttgagcggttcccggctggccgcgcagcaacagatggaaggcctcctggcgccgcaccggcccaaggagcccgcgtggttcctggccaccgtcggcgtctcgcccgaccaccagggcaagggtctgggcagcgccgtcgtgctccccggagtggaggcggccgagcgcgccggggtgcccgccttcctggagacctccgcgccccgcaacctccccttctacgagcggctcggcttcaccgtcaccgccgacgtcgaggtgcccgaaggaccgcgcacctggtgcatgacccgcaagcccggtgcctga

SEQ ID NO: 22213 - DNA, 3102 bp, Artificial Sequence
  Synthetic Polynucleotide
atggccttaccagtgaccgccttgctcctgccgctggccttgctgctccacgccgccaggccggcatgcccctacatcaacatctacaacgccgagcctgccaatcctagcgagaagaacagccccacacagtacgcctacggtaccggcgcgatagggttcctccgaacagcggaattcgacatccagatgacacagagccctagcagcctgtctgccagcgtgggagacagagtgaccatcacatgcaaggccagcgaccacatcaacaactggctggcctggtatcagcagaagcctggacaggcccctaagctgctgatctacggcgctaccacactggaaacaggcgtgcccagcagattttctggcagcggctctggcaccgactacaccctgacaatatccagcctccagcctgaggacttcgccacctactactgtcagcagagctggaacaccccttggacattcggccagggcaccaagctggaaatcaagagactcgaggacctgaagaacgtgttcccacctgaggtggccgtgttcgagcctagcaaggccgagatcgcccacacccagaaagccaccctcgtgtgcctggctaccggcttctaccccgaccatgtggaactgtcttggtgggtcaacggcaaagaggtgcacagcggcgtgtgtaccgacccccagccactgaaagaacagcccgccctgaacgacagccggtactgcctgagcagcagactgagagtgtccgccaccttctggcagaacccccggaaccacttcagatgccaggtgcagttctacggcctgagcgagaacgacgagtggacccaggacagagccaagcccgtgacccagatcgtgtctgccgaagcctggggcagagccgattgcggcatcaccagcgccagctaccaccagggcgtgctgagcgccaccatcctgtacgagatcctgctgggcaaggccaccctgtacgccgtgctggtgtctgccctggtgctgatggctatggtcaagcggaaggacagccggggaagggccaagcgatctggatctggagcaacaaacttctcactactcaaacaagcaggtgacgtggaggagaatcccgggcctactagtgccaccatggactggatttggcgcatccttttccttgtcggcgctgctaccggcgcccattccgggccccaggttcagctgcaagagtctggcggaggacttgctcaagctggcggaagcctgagactgtcttgtgccgcctctggcagaaccttcagcatgggctggtttagacaggcccctggcaaagagagagagttcgtcgccgccatcacatacagcggcggcagcccttactacgcctcttctgtcagaggccggttcaccatcagccgggacaacgccaagaacaccgtgtacctccagatgaacagcctgaagccagaggacaccgccgtgtactactgtgccgccaatccaacctacggcagcgactggaatgccgagaattggggccagggcacccaagtgacagtgtctagtggatccggcggcggaggatctggcggaggcggatctgggggcggaggctctttcgaacaagttcagcttcaacagcctggcgctgagctggtcaaacctggcgcttctgtgaagatgagctgcaaagccagcggctacgccttcagcagctactggatcaactggatgaagcagaaacccggccagggactcgaatggatcggccaaatctatcccggcgacggcgacaccaactacaacggcaagttcaagggcagagccacactgaccgccgatacctctagcagcacagcctacatgcagctgagcagcctgaccagcgaagatagcgccgtgtacttctgtgcccggtccatcacaacagtcgtgggctgcgctatggactattggggccagggaacaagcgtgaccgtgtctagtacgcgtatccagaaccctgatcctgccgtgtaccagctgcgggatagcaagagcagcgacaagagcgtgtgtctgttcaccgacttcgacagccagaccaacgtgtcccagagcaaggactccgacgtgtacatcaccgataagtgcgtgctggacatgcggagcatggacttcaagagcaactccgccgtggcctggtccaacaagtccgatttcgcctgcgccaacgccttcaacaacagcattatccccgaggacacattcttcccaagcagcgacgtgccctgcgacgtgaagctggtggaaaagagcttcgagacagacaccaacctgaacttccagaacctgagcgtgatcggcttcagaatcctgctgctgaaagtggccggctttaacctgctgatgaccctgcggctgtggtccagccgcgccaagagaagcggatctggcgtgaagcagaccctgaatttcgacctgctgaagctggctggcgacgtggaatccaacccaggcccttctagaggccatatgaccgagtacaagcccacggtgcgcctcgccacccgcgacgacgtccccagggccgtacgcaccctcgccgccgcgttcgccgactaccccgccacgcgccacaccgtcgatccggaccgccacatcgagcgggtcaccgagctgcaagaactcttcctcacgcgcgtcgggctcgacatcggcaaggtgtgggtcgcggacgacggcgccgcggtggcggtctggaccacgccggagagcgtcgaagcgggggcggtgttcgccgagatcggcccgcgcatggccgagttgagcggttcccggctggccgcgcagcaacagatggaaggcctcctggcgccgcaccggcccaaggagcccgcgtggttcctggccaccgtcggcgtctcgcccgaccaccagggcaagggtctgggcagcgccgtcgtgctccccggagtggaggcggccgagcgcgccggggtgcccgccttcctggagacctccgcgccccgcaacctccccttctacgagcggctcggcttcaccgtcaccgccgacgtcgaggtgcccgaaggaccgcgcacctggtgcatgacccgcaagcccggtgcctga

SEQ ID NO: 22214 - DNA, 3114 bp, Artificial Sequence
  Synthetic Polynucleotide
atggccttaccagtgaccgccttgctcctgccgctggccttgctgctccacgccgccaggccggcatgcccctacatcaacatctacaacgccgagcctgccaatcctagcgagaagaacagccccacacagtacgcctacggtaccggaccccaaggcatctttggacagcccggctatataaacgaattcgacatccagatgacacagagccctagcagcctgtctgccagcgtgggagacagagtgaccatcacatgcaaggccagcgaccacatcaacaactggctggcctggtatcagcagaagcctggacaggcccctaagctgctgatctacggcgctaccacactggaaacaggcgtgcccagcagattttctggcagcggctctggcaccgactacaccctgacaatatccagcctccagcctgaggacttcgccacctactactgtcagcagagctggaacaccccttggacattcggccagggcaccaagctggaaatcaagagactcgaggacctgaagaacgtgttcccacctgaggtggccgtgttcgagcctagcaaggccgagatcgcccacacccagaaagccaccctcgtgtgcctggctaccggcttctaccccgaccatgtggaactgtcttggtgggtcaacggcaaagaggtgcacagcggcgtgtgtaccgacccccagccactgaaagaacagcccgccctgaacgacagccggtactgcctgagcagcagactgagagtgtccgccaccttctggcagaacccccggaaccacttcagatgccaggtgcagttctacggcctgagcgagaacgacgagtggacccaggacagagccaagcccgtgacccagatcgtgtctgccgaagcctggggcagagccgattgcggcatcaccagcgccagctaccaccagggcgtgctgagcgccaccatcctgtacgagatcctgctgggcaaggccaccctgtacgccgtgctggtgtctgccctggtgctgatggctatggtcaagcggaaggacagccggggaagggccaagcgatctggatctggagcaacaaacttctcactactcaaacaagcaggtgacgtggaggagaatcccgggcctactagtgccaccatggactggatttggcgcatccttttccttgtcggcgctgctaccggcgcccattccgggccccaggttcagctgcaagagtctggcggaggacttgctcaagctggcggaagcctgagactgtcttgtgccgcctctggcagaaccttcagcatgggctggtttagacaggcccctggcaaagagagagagttcgtcgccgccatcacatacagcggcggcagcccttactacgcctcttctgtcagaggccggttcaccatcagccgggacaacgccaagaacaccgtgtacctccagatgaacagcctgaagccagaggacaccgccgtgtactactgtgccgccaatccaacctacggcagcgactggaatgccgagaattggggccagggcacccaagtgacagtgtctagtggatccggcggcggaggatctggcggaggcggatctgggggcggaggctctttcgaacaagttcagcttcaacagcctggcgctgagctggtcaaacctggcgcttctgtgaagatgagctgcaaagccagcggctacgccttcagcagctactggatcaactggatgaagcagaaacccggccagggactcgaatggatcggccaaatctatcccggcgacggcgacaccaactacaacggcaagttcaagggcagagccacactgaccgccgatacctctagcagcacagcctacatgcagctgagcagcctgaccagcgaagatagcgccgtgtacttctgtgcccggtccatcacaacagtcgtgggctgcgctatggactattggggccagggaacaagcgtgaccgtgtctagtacgcgtatccagaaccctgatcctgccgtgtaccagctgcgggatagcaagagcagcgacaagagcgtgtgtctgttcaccgacttcgacagccagaccaacgtgtcccagagcaaggactccgacgtgtacatcaccgataagtgcgtgctggacatgcggagcatggacttcaagagcaactccgccgtggcctggtccaacaagtccgatttcgcctgcgccaacgccttcaacaacagcattatccccgaggacacattcttcccaagcagcgacgtgccctgcgacgtgaagctggtggaaaagagcttcgagacagacaccaacctgaacttccagaacctgagcgtgatcggcttcagaatcctgctgctgaaagtggccggctttaacctgctgatgaccctgcggctgtggtccagccgcgccaagagaagcggatctggcgtgaagcagaccctgaatttcgacctgctgaagctggctggcgacgtggaatccaacccaggcccttctagaggccatatgaccgagtacaagcccacggtgcgcctcgccacccgcgacgacgtccccagggccgtacgcaccctcgccgccgcgttcgccgactaccccgccacgcgccacaccgtcgatccggaccgccacatcgagcgggtcaccgagctgcaagaactcttcctcacgcgcgtcgggctcgacatcggcaaggtgtgggtcgcggacgacggcgccgcggtggcggtctggaccacgccggagagcgtcgaagcgggggcggtgttcgccgagatcggcccgcgcatggccgagttgagcggttcccggctggccgcgcagcaacagatggaaggcctcctggcgccgcaccggcccaaggagcccgcgtggttcctggccaccgtcggcgtctcgcccgaccaccagggcaagggtctgggcagcgccgtcgtgctccccggagtggaggcggccgagcgcgccggggtgcccgccttcctggagacctccgcgccccgcaacctccccttctacgagcggctcggcttcaccgtcaccgccgacgtcgaggtgcccgaaggaccgcgcacctggtgcatgacccgcaagcccggtgcctga

SEQ ID NO: 22215 - DNA, 3096 bp, Artificial Sequence
  Synthetic Polynucleotide
atggccttaccagtgaccgccttgctcctgccgctggccttgctgctccacgccgccaggccggcatgcccctacatcaacatctacaacgccgagcctgccaatcctagcgagaagaacagccccacacagtacgcctacggtaccggagcagtagtcaggggagccgaattcgacatccagatgacacagagccctagcagcctgtctgccagcgtgggagacagagtgaccatcacatgcaaggccagcgaccacatcaacaactggctggcctggtatcagcagaagcctggacaggcccctaagctgctgatctacggcgctaccacactggaaacaggcgtgcccagcagattttctggcagcggctctggcaccgactacaccctgacaatatccagcctccagcctgaggacttcgccacctactactgtcagcagagctggaacaccccttggacattcggccagggcaccaagctggaaatcaagagactcgaggacctgaagaacgtgttcccacctgaggtggccgtgttcgagcctagcaaggccgagatcgcccacacccagaaagccaccctcgtgtgcctggctaccggcttctaccccgaccatgtggaactgtcttggtgggtcaacggcaaagaggtgcacagcggcgtgtgtaccgacccccagccactgaaagaacagcccgccctgaacgacagccggtactgcctgagcagcagactgagagtgtccgccaccttctggcagaacccccggaaccacttcagatgccaggtgcagttctacggcctgagcgagaacgacgagtggacccaggacagagccaagcccgtgacccagatcgtgtctgccgaagcctggggcagagccgattgcggcatcaccagcgccagctaccaccagggcgtgctgagcgccaccatcctgtacgagatcctgctgggcaaggccaccctgtacgccgtgctggtgtctgccctggtgctgatggctatggtcaagcggaaggacagccggggaagggccaagcgatctggatctggagcaacaaacttctcactactcaaacaagcaggtgacgtggaggagaatcccgggcctactagtgccaccatggactggatttggcgcatccttttccttgtcggcgctgctaccggcgcccattccgggccccaggttcagctgcaagagtctggcggaggacttgctcaagctggcggaagcctgagactgtcttgtgccgcctctggcagaaccttcagcatgggctggtttagacaggcccctggcaaagagagagagttcgtcgccgccatcacatacagcggcggcagcccttactacgcctcttctgtcagaggccggttcaccatcagccgggacaacgccaagaacaccgtgtacctccagatgaacagcctgaagccagaggacaccgccgtgtactactgtgccgccaatccaacctacggcagcgactggaatgccgagaattggggccagggcacccaagtgacagtgtctagtggatccggcggcggaggatctggcggaggcggatctgggggcggaggctctttcgaacaagttcagcttcaacagcctggcgctgagctggtcaaacctggcgcttctgtgaagatgagctgcaaagccagcggctacgccttcagcagctactggatcaactggatgaagcagaaacccggccagggactcgaatggatcggccaaatctatcccggcgacggcgacaccaactacaacggcaagttcaagggcagagccacactgaccgccgatacctctagcagcacagcctacatgcagctgagcagcctgaccagcgaagatagcgccgtgtacttctgtgcccggtccatcacaacagtcgtgggctgcgctatggactattggggccagggaacaagcgtgaccgtgtctagtacgcgtatccagaaccctgatcctgccgtgtaccagctgcgggatagcaagagcagcgacaagagcgtgtgtctgttcaccgacttcgacagccagaccaacgtgtcccagagcaaggactccgacgtgtacatcaccgataagtgcgtgctggacatgcggagcatggacttcaagagcaactccgccgtggcctggtccaacaagtccgatttcgcctgcgccaacgccttcaacaacagcattatccccgaggacacattcttcccaagcagcgacgtgccctgcgacgtgaagctggtggaaaagagcttcgagacagacaccaacctgaacttccagaacctgagcgtgatcggcttcagaatcctgctgctgaaagtggccggctttaacctgctgatgaccctgcggctgtggtccagccgcgccaagagaagcggatctggcgtgaagcagaccctgaatttcgacctgctgaagctggctggcgacgtggaatccaacccaggcccttctagaggccatatgaccgagtacaagcccacggtgcgcctcgccacccgcgacgacgtccccagggccgtacgcaccctcgccgccgcgttcgccgactaccccgccacgcgccacaccgtcgatccggaccgccacatcgagcgggtcaccgagctgcaagaactcttcctcacgcgcgtcgggctcgacatcggcaaggtgtgggtcgcggacgacggcgccgcggtggcggtctggaccacgccggagagcgtcgaagcgggggcggtgttcgccgagatcggcccgcgcatggccgagttgagcggttcccggctggccgcgcagcaacagatggaaggcctcctggcgccgcaccggcccaaggagcccgcgtggttcctggccaccgtcggcgtctcgcccgaccaccagggcaagggtctgggcagcgccgtcgtgctccccggagtggaggcggccgagcgcgccggggtgcccgccttcctggagacctccgcgccccgcaacctccccttctacgagcggctcggcttcaccgtcaccgccgacgtcgaggtgcccgaaggaccgcgcacctggtgcatgacccgcaagcccggtgcctga

SEQ ID NO: 22216 - DNA, 3081 bp, Artificial Sequence
  Synthetic Polynucleotide
atggccttaccagtgaccgccttgctcctgccgctggccttgctgctccacgccgccaggccggcatgcccccagcttggtccgtatgagctttgggaattgagccacggtaccggaccccaaggcatctttggacagcccggctatataaacgaattcgacatccagatgacacagagccctagcagcctgtctgccagcgtgggagacagagtgaccatcacatgcaaggccagcgaccacatcaacaactggctggcctggtatcagcagaagcctggacaggcccctaagctgctgatctacggcgctaccacactggaaacaggcgtgcccagcagattttctggcagcggctctggcaccgactacaccctgacaatatccagcctccagcctgaggacttcgccacctactactgtcagcagagctggaacaccccttggacattcggccagggcaccaagctggaaatcaagagactcgaggacctgaagaacgtgttcccacctgaggtggccgtgttcgagcctagcaaggccgagatcgcccacacccagaaagccaccctcgtgtgcctggctaccggcttctaccccgaccatgtggaactgtcttggtgggtcaacggcaaagaggtgcacagcggcgtgtgtaccgacccccagccactgaaagaacagcccgccctgaacgacagccggtactgcctgagcagcagactgagagtgtccgccaccttctggcagaacccccggaaccacttcagatgccaggtgcagttctacggcctgagcgagaacgacgagtggacccaggacagagccaagcccgtgacccagatcgtgtctgccgaagcctggggcagagccgattgcggcatcaccagcgccagctaccaccagggcgtgctgagcgccaccatcctgtacgagatcctgctgggcaaggccaccctgtacgccgtgctggtgtctgccctggtgctgatggctatggtcaagcggaaggacagccggggaagggccaagcgatctggatctggagcaacaaacttctcactactcaaacaagcaggtgacgtggaggagaatcccgggcctactagtgccaccatggactggatttggcgcatccttttccttgtcggcgctgctaccggcgcccattccgggccccaggttcagctgcaagagtctggcggaggacttgctcaagctggcggaagcctgagactgtcttgtgccgcctctggcagaaccttcagcatgggctggtttagacaggcccctggcaaagagagagagttcgtcgccgccatcacatacagcggcggcagcccttactacgcctcttctgtcagaggccggttcaccatcagccgggacaacgccaagaacaccgtgtacctccagatgaacagcctgaagccagaggacaccgccgtgtactactgtgccgccaatccaacctacggcagcgactggaatgccgagaattggggccagggcacccaagtgacagtgtctagtggatccggcggcggaggatctggcggaggcggatctgggggcggaggctctttcgaacaagttcagcttcaacagcctggcgctgagctggtcaaacctggcgcttctgtgaagatgagctgcaaagccagcggctacgccttcagcagctactggatcaactggatgaagcagaaacccggccagggactcgaatggatcggccaaatctatcccggcgacggcgacaccaactacaacggcaagttcaagggcagagccacactgaccgccgatacctctagcagcacagcctacatgcagctgagcagcctgaccagcgaagatagcgccgtgtacttctgtgcccggtccatcacaacagtcgtgggctgcgctatggactattggggccagggaacaagcgtgaccgtgtctagtacgcgtatccagaaccctgatcctgccgtgtaccagctgcgggatagcaagagcagcgacaagagcgtgtgtctgttcaccgacttcgacagccagaccaacgtgtcccagagcaaggactccgacgtgtacatcaccgataagtgcgtgctggacatgcggagcatggacttcaagagcaactccgccgtggcctggtccaacaagtccgatttcgcctgcgccaacgccttcaacaacagcattatccccgaggacacattcttcccaagcagcgacgtgccctgcgacgtgaagctggtggaaaagagcttcgagacagacaccaacctgaacttccagaacctgagcgtgatcggcttcagaatcctgctgctgaaagtggccggctttaacctgctgatgaccctgcggctgtggtccagccgcgccaagagaagcggatctggcgtgaagcagaccctgaatttcgacctgctgaagctggctggcgacgtggaatccaacccaggcccttctagaggccatatgaccgagtacaagcccacggtgcgcctcgccacccgcgacgacgtccccagggccgtacgcaccctcgccgccgcgttcgccgactaccccgccacgcgccacaccgtcgatccggaccgccacatcgagcgggtcaccgagctgcaagaactcttcctcacgcgcgtcgggctcgacatcggcaaggtgtgggtcgcggacgacggcgccgcggtggcggtctggaccacgccggagagcgtcgaagcgggggcggtgttcgccgagatcggcccgcgcatggccgagttgagcggttcccggctggccgcgcagcaacagatggaaggcctcctggcgccgcaccggcccaaggagcccgcgtggttcctggccaccgtcggcgtctcgcccgaccaccagggcaagggtctgggcagcgccgtcgtgctccccggagtggaggcggccgagcgcgccggggtgcccgccttcctggagacctccgcgccccgcaacctccccttctacgagcggctcggcttcaccgtcaccgccgacgtcgaggtgcccgaaggaccgcgcacctggtgcatgacccgcaagcccggtgcctga

SEQ ID NO: 22217 - DNA, 3381 bp, Artificial Sequence
  Synthetic Polynucleotide
atggccttaccagtgaccgccttgctcctgccgctggccttgctgctccacgccgccaggccggcatgcgaagtgcagctgcttgaaagtggcggcggactgattcagcctggcggatctctgagactgagctgtgccgccagcggcttcaccttttctagccacgccatgacctgggtccgacaggcacctggaaaagggcttgaatgggtgtccgccatcagcggctctggcgattacacacactacgccgacagcgtgaagggcagattcaccatcagcagagacaacagcaagaacaccgtgtacctccagatgaacagcctgagagccgaggacagcgccgtgtattattgcgccaaggatgaggatggcggcagcctgcttggacacagaggacaaggcaccctggtcaccgtttcttccggtaccggagcagtagtcaggggagccgaattcgacatccagatgacacagagccctagcagcctgtctgccagcgtgggagacagagtgaccatcacatgcaaggccagcgaccacatcaacaactggctggcctggtatcagcagaagcctggacaggcccctaagctgctgatctacggcgctaccacactggaaacaggcgtgcccagcagattttctggcagcggctctggcaccgactacaccctgacaatatccagcctccagcctgaggacttcgccacctactactgtcagcagagctggaacaccccttggacattcggccagggcaccaagctggaaatcaagagactcgaggacctgaagaacgtgttcccacctgaggtggccgtgttcgagcctagcaaggccgagatcgcccacacccagaaagccaccctcgtgtgcctggctaccggcttctaccccgaccatgtggaactgtcttggtgggtcaacggcaaagaggtgcacagcggcgtgtgtaccgacccccagccactgaaagaacagcccgccctgaacgacagccggtactgcctgagcagcagactgagagtgtccgccaccttctggcagaacccccggaaccacttcagatgccaggtgcagttctacggcctgagcgagaacgacgagtggacccaggacagagccaagcccgtgacccagatcgtgtctgccgaagcctggggcagagccgattgcggcatcaccagcgccagctaccaccagggcgtgctgagcgccaccatcctgtacgagatcctgctgggcaaggccaccctgtacgccgtgctggtgtctgccctggtgctgatggctatggtcaagcggaaggacagccggggaagggccaagcgatctggatctggagcaacaaacttctcactactcaaacaagcaggtgacgtggaggagaatcccgggcctactagtgccaccatggactggatttggcgcatccttttccttgtcggcgctgctaccggcgcccattccgggcccgaagtgcagctggttgaatctggcggaggactggttcaggctggcggatctctgagactgtcttgtgccgccagcggcagaacctttagcatgggctggtttagacaggcccctggcaaagagagagagttcgtcgccgccatcacatactctggcggcagcccttactacgccgactctgtgaagggcagattcaccatcagccgggacaacgccaagaacaccgtgtacctccagatgaacagcctgaagcctgaggacaccgccgtgtactactgcgccgccaatccaacatacggcagcgactggaacgccgagaattggggccagggaacccaagtgacagtgtctagcggatccggcggcggaggatctggcggaggcggatctgggggcggaggctctttcgaacaagttcagcttcaacagcctggcgctgagctggtcaaacctggcgcttctgtgaagatgagctgcaaagccagcggctacgccttcagcagctactggatcaactggatgaagcagaaacccggccagggactcgaatggatcggccaaatctatcccggcgacggcgacaccaactacaacggcaagttcaagggcagagccacactgaccgccgatacctctagcagcacagcctacatgcagctgagcagcctgaccagcgaagatagcgccgtgtacttctgtgcccggtccatcacaacagtcgtgggctgcgctatggactattggggccagggaacaagcgtgaccgtgtctagtacgcgtatccagaaccctgatcctgccgtgtaccagctgcgggatagcaagagcagcgacaagagcgtgtgtctgttcaccgacttcgacagccagaccaacgtgtcccagagcaaggactccgacgtgtacatcaccgataagtgcgtgctggacatgcggagcatggacttcaagagcaactccgccgtggcctggtccaacaagtccgatttcgcctgcgccaacgccttcaacaacagcattatccccgaggacacattcttcccaagccccgagagcagctgcgacgtgaagctggtggaaaagagcttcgagacagacaccaacctgaacttccagaacctgagcgtgatcggcttcagaatcctgctgctgaaagtggccggctttaacctgctgatgaccctgcggctgtggtccagccgcgccaagagaagcggatctggcgtgaagcagaccctgaatttcgacctgctgaagctggctggcgacgtggaatccaacccaggcccttctagaggccatatgaccgagtacaagcccacggtgcgcctcgccacccgcgacgacgtccccagggccgtacgcaccctcgccgccgcgttcgccgactaccccgccacgcgccacaccgtcgatccggaccgccacatcgagcgggtcaccgagctgcaagaactcttcctcacgcgcgtcgggctcgacatcggcaaggtgtgggtcgcggacgacggcgccgcggtggcggtctggaccacgccggagagcgtcgaagcgggggcggtgttcgccgagatcggcccgcgcatggccgagttgagcggttcccggctggccgcgcagcaacagatggaaggcctcctggcgccgcaccggcccaaggagcccgcgtggttcctggccaccgtcggcgtctcgcccgaccaccagggcaagggtctgggcagcgccgtcgtgctccccggagtggaggcggccgagcgcgccggggtgcccgccttcctggagacctccgcgccccgcaacctccccttctacgagcggctcggcttcaccgtcaccgccgacgtcgaggtgcccgaaggaccgcgcacctggtgcatgacccgcaagcccggtgcctga

SEQ ID NO: 22218 - DNA, 3084 bp, Artificial Sequence
  Synthetic Polynucleotide
atggccttaccagtgaccgccttgctcctgccgctggccttgctgctccacgccgccaggccggcatgccaagataagctgacgcaatggccaaaatggttggaaggtaccggcggaggcggatctggcggcggaggtagcggtggcggaggatctgaattcgacatccagatgacacagagccctagcagcctgtctgccagcgtgggagacagagtgaccatcacatgcaaggccagcgaccacatcaacaactggctggcctggtatcagcagaagcctggacaggcccctaagctgctgatctacggcgctaccacactggaaacaggcgtgcccagcagattttctggcagcggctctggcaccgactacaccctgacaatatccagcctccagcctgaggacttcgccacctactactgtcagcagagctggaacaccccttggacattcggccagggcaccaagctggaaatcaagagactcgaggacctgaagaacgtgttcccacctgaggtggccgtgttcgagcctagcaaggccgagatcgcccacacccagaaagccaccctcgtgtgcctggctaccggcttctaccccgaccatgtggaactgtcttggtgggtcaacggcaaagaggtgcacagcggcgtgtgtaccgacccccagccactgaaagaacagcccgccctgaacgacagccggtactgcctgagcagcagactgagagtgtccgccaccttctggcagaacccccggaaccacttcagatgccaggtgcagttctacggcctgagcgagaacgacgagtggacccaggacagagccaagcccgtgacccagatcgtgtctgccgaagcctggggcagagccgattgcggcatcaccagcgccagctaccaccagggcgtgctgagcgccaccatcctgtacgagatcctgctgggcaaggccaccctgtacgccgtgctggtgtctgccctggtgctgatggctatggtcaagcggaaggacagccggggaagggccaagcgatctggatctggagcaacaaacttctcactactcaaacaagcaggtgacgtggaggagaatcccgggcctactagtgccaccatggactggatttggcgcatccttttccttgtcggcgctgctaccggcgcccattccgggccccaggttcagctgcaagagtctggcggaggacttgctcaagctggcggaagcctgagactgtcttgtgccgcctctggcagaaccttcagcatgggctggtttagacaggcccctggcaaagagagagagttcgtcgccgccatcacatacagcggcggcagcccttactacgcctcttctgtcagaggccggttcaccatcagccgggacaacgccaagaacaccgtgtacctccagatgaacagcctgaagccagaggacaccgccgtgtactactgtgccgccaatccaacctacggcagcgactggaatgccgagaattggggccagggcacccaagtgacagtgtctagtggatccggcggcggaggatctggcggaggcggatctgggggcggaggctctttcgaacaagttcagcttcaacagcctggcgctgagctggtcaaacctggcgcttctgtgaagatgagctgcaaagccagcggctacgccttcagcagctactggatcaactggatgaagcagaaacccggccagggactcgaatggatcggccaaatctatcccggcgacggcgacaccaactacaacggcaagttcaagggcagagccacactgaccgccgatacctctagcagcacagcctacatgcagctgagcagcctgaccagcgaagatagcgccgtgtacttctgtgcccggtccatcacaacagtcgtgggctgcgctatggactattggggccagggaacaagcgtgaccgtgtctagtacgcgtatccagaaccctgatcctgccgtgtaccagctgcgggatagcaagagcagcgacaagagcgtgtgtctgttcaccgacttcgacagccagaccaacgtgtcccagagcaaggactccgacgtgtacatcaccgataagtgcgtgctggacatgcggagcatggacttcaagagcaactccgccgtggcctggtccaacaagtccgatttcgcctgcgccaacgccttcaacaacagcattatccccgaggacacattcttcccaagcagcgacgtgccctgcgacgtgaagctggtggaaaagagcttcgagacagacaccaacctgaacttccagaacctgagcgtgatcggcttcagaatcctgctgctgaaagtggccggctttaacctgctgatgaccctgcggctgtggtccagccgcgccaagagaagcggatctggcgtgaagcagaccctgaatttcgacctgctgaagctggctggcgacgtggaatccaacccaggcccttctagaggccatatgaccgagtacaagcccacggtgcgcctcgccacccgcgacgacgtccccagggccgtacgcaccctcgccgccgcgttcgccgactaccccgccacgcgccacaccgtcgatccggaccgccacatcgagcgggtcaccgagctgcaagaactcttcctcacgcgcgtcgggctcgacatcggcaaggtgtgggtcgcggacgacggcgccgcggtggcggtctggaccacgccggagagcgtcgaagcgggggcggtgttcgccgagatcggcccgcgcatggccgagttgagcggttcccggctggccgcgcagcaacagatggaaggcctcctggcgccgcaccggcccaaggagcccgcgtggttcctggccaccgtcggcgtctcgcccgaccaccagggcaagggtctgggcagcgccgtcgtgctccccggagtggaggcggccgagcgcgccggggtgcccgccttcctggagacctccgcgccccgcaacctccccttctacgagcggctcggcttcaccgtcaccgccgacgtcgaggtgcccgaaggaccgcgcacctggtgcatgacccgcaagcccggtgcctga

SEQ ID NO: 22219 - DNA, 2667 bp, Artificial Sequence
  Synthetic Polynucleotide
atggccttaccagtgaccgccttgctcctgccgctggccttgctgctccacgccgccaggccggacatccagatgacacagagccctagcagcctgtctgccagcgtgggagacagagtgaccatcacatgcaaggccagcgaccacatcaacaactggctggcctggtatcagcagaagcctggacaggcccctaagctgctgatctacggcgctaccacactggaaacaggcgtgcccagcagattttctggcagcggctctggcaccgactacaccctgacaatatccagcctccagcctgaggacttcgccacctactactgtcagcagagctggaacaccccttggacattcggccagggcaccaagctggaaatcaagagactcgaggacctgaagaacgtgttcccacctgaggtggccgtgttcgagcctagcgaggccgagatcagccacacccagaaagccaccctcgtgtgcctggctaccggcttctaccccgaccatgtggaactgtcttggtgggtcaacggcaaagaggtgcacagcggcgtgtgtaccgacccccagccactgaaagaacagcccgccctgaacgacagccggtactgcctgagcagcagactgagagtgtccgccaccttctggcagaacccccggaaccacttcagatgccaggtgcagttctacggcctgagcgagaacgacgagtggacccaggacagagccaagcccgtgacccagatcgtgtctgccgaagcctggggcagagccgattgcggctttaccagcgagagctaccagcagggcgtgctgagcgccaccatcctgtacgagatcctgctgggcaaggccaccctgtacgccgtgctggtgtctgccctggtgctgatggctatggtcaagcggaaggacagccggggaagggccaagcgatctggatctggagcaacaaacttctcactactcaaacaagcaggtgacgtggaggagaatcccgggcctactagtgccaccatggactggatttggcgcatccttttccttgtcggcgctgctaccggcgcccattccgggcccagcgcctgtccatattcaaatccgtcactttgctctggatccggcggcggaggatctggcggaggcggatctgggggcggaggctctttcgaacaagttcagcttcaacagcctggcgctgagctggtcaaacctggcgcttctgtgaagatgagctgcaaagccagcggctacgccttcagcagctactggatcaactggatgaagcagaaacccggccagggactcgaatggatcggccaaatctatcccggcgacggcgacaccaactacaacggcaagttcaagggcagagccacactgaccgccgatacctctagcagcacagcctacatgcagctgagcagcctgaccagcgaagatagcgccgtgtacttctgtgcccggtccatcacaacagtcgtgggctgcgctatggactattggggccagggaacaagcgtgaccgtgtctagtacgcgtatccagaaccctgatcctgccgtgtaccagctgcgggatagcaagagcagcgacaagagcgtgtgtctgttcaccgacttcgacagccagaccaacgtgtcccagagcaaggactccgacgtgtacatcaccgataagtgcgtgctggacatgcggagcatggacttcaagagcaactccgccgtggcctggtccaacaagtccgatttcgcctgcgccaacgccttcaacaacagcattatccccgaggacacattcttcccaagccccgagagcagctgcgacgtgaagctggtggaaaagagcttcgagacagacaccaacctgaacttccagaacctgagcgtgatcggcttcagaatcctgctgctgaaagtggccggctttaacctgctgatgaccctgcggctgtggtccagccgcgccaagagaagcggatctggcgtgaagcagaccctgaatttcgacctgctgaagctggctggcgacgtggaatccaacccaggcccttctagaggccatatgaccgagtacaagcccacggtgcgcctcgccacccgcgacgacgtccccagggccgtacgcaccctcgccgccgcgttcgccgactaccccgccacgcgccacaccgtcgatccggaccgccacatcgagcgggtcaccgagctgcaagaactcttcctcacgcgcgtcgggctcgacatcggcaaggtgtgggtcgcggacgacggcgccgcggtggcggtctggaccacgccggagagcgtcgaagcgggggcggtgttcgccgagatcggcccgcgcatggccgagttgagcggttcccggctggccgcgcagcaacagatggaaggcctcctggcgccgcaccggcccaaggagcccgcgtggttcctggccaccgtcggcgtctcgcccgaccaccagggcaagggtctgggcagcgccgtcgtgctccccggagtggaggcggccgagcgcgccggggtgcccgccttcctggagacctccgcgccccgcaacctccccttctacgagcggctcggcttcaccgtcaccgccgacgtcgaggtgcccgaaggaccgcgcacctggtgcatgacccgcaagcccggtgcctga

SEQ ID NO: 22220 - DNA, 3387 bp, Artificial Sequence
  Synthetic Polynucleotide
atggccttaccagtgaccgccttgctcctgccgctggccttgctgctccacgccgccaggccggcatgcgaagtgcagctgcttgaaagtggcggcggactgattcagcctggcggatctctgagactgagctgtgccgccagcggcttcaccttttctagccacgccatgacctgggtccgacaggcacctggaaaagggcttgaatgggtgtccgccatcagcggctctggcgattacacacactacgccgacagcgtgaagggcagattcaccatcagcagagacaacagcaagaacaccgtgtacctccagatgaacagcctgagagccgaggacagcgccgtgtattattgcgccaaggatgaggatggcggcagcctgcttggacacagaggacaaggcaccctggtcaccgtttcttccggtaccggcgcgatagggttcctccgaacagcggaattcgacatccagatgacacagagccctagcagcctgtctgccagcgtgggagacagagtgaccatcacatgcaaggccagcgaccacatcaacaactggctggcctggtatcagcagaagcctggacaggcccctaagctgctgatctacggcgctaccacactggaaacaggcgtgcccagcagattttctggcagcggctctggcaccgactacaccctgacaatatccagcctccagcctgaggacttcgccacctactactgtcagcagagctggaacaccccttggacattcggccagggcaccaagctggaaatcaagagactcgaggacctgaagaacgtgttcccacctgaggtggccgtgttcgagcctagcaaggccgagatcgcccacacccagaaagccaccctcgtgtgcctggctaccggcttctaccccgaccatgtggaactgtcttggtgggtcaacggcaaagaggtgcacagcggcgtgtgtaccgacccccagccactgaaagaacagcccgccctgaacgacagccggtactgcctgagcagcagactgagagtgtccgccaccttctggcagaacccccggaaccacttcagatgccaggtgcagttctacggcctgagcgagaacgacgagtggacccaggacagagccaagcccgtgacccagatcgtgtctgccgaagcctggggcagagccgattgcggcatcaccagcgccagctaccaccagggcgtgctgagcgccaccatcctgtacgagatcctgctgggcaaggccaccctgtacgccgtgctggtgtctgccctggtgctgatggctatggtcaagcggaaggacagccggggaagggccaagcgatctggatctggagcaacaaacttctcactactcaaacaagcaggtgacgtggaggagaatcccgggcctactagtgccaccatggactggatttggcgcatccttttccttgtcggcgctgctaccggcgcccattccgggcccgaagtgcagctggttgaatctggcggaggactggttcaggctggcggatctctgagactgtcttgtgccgccagcggcagaacctttagcatgggctggtttagacaggcccctggcaaagagagagagttcgtcgccgccatcacatactctggcggcagcccttactacgccgactctgtgaagggcagattcaccatcagccgggacaacgccaagaacaccgtgtacctccagatgaacagcctgaagcctgaggacaccgccgtgtactactgcgccgccaatccaacatacggcagcgactggaacgccgagaattggggccagggaacccaagtgacagtgtctagcggatccggcggcggaggatctggcggaggcggatctgggggcggaggctctttcgaacaagttcagcttcaacagcctggcgctgagctggtcaaacctggcgcttctgtgaagatgagctgcaaagccagcggctacgccttcagcagctactggatcaactggatgaagcagaaacccggccagggactcgaatggatcggccaaatctatcccggcgacggcgacaccaactacaacggcaagttcaagggcagagccacactgaccgccgatacctctagcagcacagcctacatgcagctgagcagcctgaccagcgaagatagcgccgtgtacttctgtgcccggtccatcacaacagtcgtgggctgcgctatggactattggggccagggaacaagcgtgaccgtgtctagtacgcgtatccagaaccctgatcctgccgtgtaccagctgcgggatagcaagagcagcgacaagagcgtgtgtctgttcaccgacttcgacagccagaccaacgtgtcccagagcaaggactccgacgtgtacatcaccgataagtgcgtgctggacatgcggagcatggacttcaagagcaactccgccgtggcctggtccaacaagtccgatttcgcctgcgccaacgccttcaacaacagcattatccccgaggacacattcttcccaagccccgagagcagctgcgacgtgaagctggtggaaaagagcttcgagacagacaccaacctgaacttccagaacctgagcgtgatcggcttcagaatcctgctgctgaaagtggccggctttaacctgctgatgaccctgcggctgtggtccagccgcgccaagagaagcggatctggcgtgaagcagaccctgaatttcgacctgctgaagctggctggcgacgtggaatccaacccaggcccttctagaggccatatgaccgagtacaagcccacggtgcgcctcgccacccgcgacgacgtccccagggccgtacgcaccctcgccgccgcgttcgccgactaccccgccacgcgccacaccgtcgatccggaccgccacatcgagcgggtcaccgagctgcaagaactcttcctcacgcgcgtcgggctcgacatcggcaaggtgtgggtcgcggacgacggcgccgcggtggcggtctggaccacgccggagagcgtcgaagcgggggcggtgttcgccgagatcggcccgcgcatggccgagttgagcggttcccggctggccgcgcagcaacagatggaaggcctcctggcgccgcaccggcccaaggagcccgcgtggttcctggccaccgtcggcgtctcgcccgaccaccagggcaagggtctgggcagcgccgtcgtgctccccggagtggaggcggccgagcgcgccggggtgcccgccttcctggagacctccgcgccccgcaacctccccttctacgagcggctcggcttcaccgtcaccgccgacgtcgaggtgcccgaaggaccgcgcacctggtgcatgacccgcaagcccggtgcctga

SEQ ID NO: 22221 - DNA, 3399 bp, Artificial Sequence
  Synthetic Polynucleotide
atggccttaccagtgaccgccttgctcctgccgctggccttgctgctccacgccgccaggccggcatgcgaagtgcagctgcttgaaagtggcggcggactgattcagcctggcggatctctgagactgagctgtgccgccagcggcttcaccttttctagccacgccatgacctgggtccgacaggcacctggaaaagggcttgaatgggtgtccgccatcagcggctctggcgattacacacactacgccgacagcgtgaagggcagattcaccatcagcagagacaacagcaagaacaccgtgtacctccagatgaacagcctgagagccgaggacagcgccgtgtattattgcgccaaggatgaggatggcggcagcctgcttggacacagaggacaaggcaccctggtcaccgtttcttccggtaccggaccccaaggcatctttggacagcccggctatataaacgaattcgacatccagatgacacagagccctagcagcctgtctgccagcgtgggagacagagtgaccatcacatgcaaggccagcgaccacatcaacaactggctggcctggtatcagcagaagcctggacaggcccctaagctgctgatctacggcgctaccacactggaaacaggcgtgcccagcagattttctggcagcggctctggcaccgactacaccctgacaatatccagcctccagcctgaggacttcgccacctactactgtcagcagagctggaacaccccttggacattcggccagggcaccaagctggaaatcaagagactcgaggacctgaagaacgtgttcccacctgaggtggccgtgttcgagcctagcaaggccgagatcgcccacacccagaaagccaccctcgtgtgcctggctaccggcttctaccccgaccatgtggaactgtcttggtgggtcaacggcaaagaggtgcacagcggcgtgtgtaccgacccccagccactgaaagaacagcccgccctgaacgacagccggtactgcctgagcagcagactgagagtgtccgccaccttctggcagaacccccggaaccacttcagatgccaggtgcagttctacggcctgagcgagaacgacgagtggacccaggacagagccaagcccgtgacccagatcgtgtctgccgaagcctggggcagagccgattgcggcatcaccagcgccagctaccaccagggcgtgctgagcgccaccatcctgtacgagatcctgctgggcaaggccaccctgtacgccgtgctggtgtctgccctggtgctgatggctatggtcaagcggaaggacagccggggaagggccaagcgatctggatctggagcaacaaacttctcactactcaaacaagcaggtgacgtggaggagaatcccgggcctactagtgccaccatggactggatttggcgcatccttttccttgtcggcgctgctaccggcgcccattccgggcccgaagtgcagctggttgaatctggcggaggactggttcaggctggcggatctctgagactgtcttgtgccgccagcggcagaacctttagcatgggctggtttagacaggcccctggcaaagagagagagttcgtcgccgccatcacatactctggcggcagcccttactacgccgactctgtgaagggcagattcaccatcagccgggacaacgccaagaacaccgtgtacctccagatgaacagcctgaagcctgaggacaccgccgtgtactactgcgccgccaatccaacatacggcagcgactggaacgccgagaattggggccagggaacccaagtgacagtgtctagcggatccggcggcggaggatctggcggaggcggatctgggggcggaggctctttcgaacaagttcagcttcaacagcctggcgctgagctggtcaaacctggcgcttctgtgaagatgagctgcaaagccagcggctacgccttcagcagctactggatcaactggatgaagcagaaacccggccagggactcgaatggatcggccaaatctatcccggcgacggcgacaccaactacaacggcaagttcaagggcagagccacactgaccgccgatacctctagcagcacagcctacatgcagctgagcagcctgaccagcgaagatagcgccgtgtacttctgtgcccggtccatcacaacagtcgtgggctgcgctatggactattggggccagggaacaagcgtgaccgtgtctagtacgcgtatccagaaccctgatcctgccgtgtaccagctgcgggatagcaagagcagcgacaagagcgtgtgtctgttcaccgacttcgacagccagaccaacgtgtcccagagcaaggactccgacgtgtacatcaccgataagtgcgtgctggacatgcggagcatggacttcaagagcaactccgccgtggcctggtccaacaagtccgatttcgcctgcgccaacgccttcaacaacagcattatccccgaggacacattcttcccaagccccgagagcagctgcgacgtgaagctggtggaaaagagcttcgagacagacaccaacctgaacttccagaacctgagcgtgatcggcttcagaatcctgctgctgaaagtggccggctttaacctgctgatgaccctgcggctgtggtccagccgcgccaagagaagcggatctggcgtgaagcagaccctgaatttcgacctgctgaagctggctggcgacgtggaatccaacccaggcccttctagaggccatatgaccgagtacaagcccacggtgcgcctcgccacccgcgacgacgtccccagggccgtacgcaccctcgccgccgcgttcgccgactaccccgccacgcgccacaccgtcgatccggaccgccacatcgagcgggtcaccgagctgcaagaactcttcctcacgcgcgtcgggctcgacatcggcaaggtgtgggtcgcggacgacggcgccgcggtggcggtctggaccacgccggagagcgtcgaagcgggggcggtgttcgccgagatcggcccgcgcatggccgagttgagcggttcccggctggccgcgcagcaacagatggaaggcctcctggcgccgcaccggcccaaggagcccgcgtggttcctggccaccgtcggcgtctcgcccgaccaccagggcaagggtctgggcagcgccgtcgtgctccccggagtggaggcggccgagcgcgccggggtgcccgccttcctggagacctccgcgccccgcaacctccccttctacgagcggctcggcttcaccgtcaccgccgacgtcgaggtgcccgaaggaccgcgcacctggtgcatgacccgcaagcccggtgcctga

SEQ ID NO: 22222 - DNA, 3063 bp, Artificial Sequence
  Synthetic Polynucleotide
atggccttaccagtgaccgccttgctcctgccgctggccttgctgctccacgccgccaggccggcatgcccccagcttggtccgtatgagctttgggaattgagccacggtaccggagcagtagtcaggggagccgaattcgacatccagatgacacagagccctagcagcctgtctgccagcgtgggagacagagtgaccatcacatgcaaggccagcgaccacatcaacaactggctggcctggtatcagcagaagcctggacaggcccctaagctgctgatctacggcgctaccacactggaaacaggcgtgcccagcagattttctggcagcggctctggcaccgactacaccctgacaatatccagcctccagcctgaggacttcgccacctactactgtcagcagagctggaacaccccttggacattcggccagggcaccaagctggaaatcaagagactcgaggacctgaagaacgtgttcccacctgaggtggccgtgttcgagcctagcaaggccgagatcgcccacacccagaaagccaccctcgtgtgcctggctaccggcttctaccccgaccatgtggaactgtcttggtgggtcaacggcaaagaggtgcacagcggcgtgtgtaccgacccccagccactgaaagaacagcccgccctgaacgacagccggtactgcctgagcagcagactgagagtgtccgccaccttctggcagaacccccggaaccacttcagatgccaggtgcagttctacggcctgagcgagaacgacgagtggacccaggacagagccaagcccgtgacccagatcgtgtctgccgaagcctggggcagagccgattgcggcatcaccagcgccagctaccaccagggcgtgctgagcgccaccatcctgtacgagatcctgctgggcaaggccaccctgtacgccgtgctggtgtctgccctggtgctgatggctatggtcaagcggaaggacagccggggaagggccaagcgatctggatctggagcaacaaacttctcactactcaaacaagcaggtgacgtggaggagaatcccgggcctactagtgccaccatggactggatttggcgcatccttttccttgtcggcgctgctaccggcgcccattccgggccccaggttcagctgcaagagtctggcggaggacttgctcaagctggcggaagcctgagactgtcttgtgccgcctctggcagaaccttcagcatgggctggtttagacaggcccctggcaaagagagagagttcgtcgccgccatcacatacagcggcggcagcccttactacgcctcttctgtcagaggccggttcaccatcagccgggacaacgccaagaacaccgtgtacctccagatgaacagcctgaagccagaggacaccgccgtgtactactgtgccgccaatccaacctacggcagcgactggaatgccgagaattggggccagggcacccaagtgacagtgtctagtggatccggcggcggaggatctggcggaggcggatctgggggcggaggctctttcgaacaagttcagcttcaacagcctggcgctgagctggtcaaacctggcgcttctgtgaagatgagctgcaaagccagcggctacgccttcagcagctactggatcaactggatgaagcagaaacccggccagggactcgaatggatcggccaaatctatcccggcgacggcgacaccaactacaacggcaagttcaagggcagagccacactgaccgccgatacctctagcagcacagcctacatgcagctgagcagcctgaccagcgaagatagcgccgtgtacttctgtgcccggtccatcacaacagtcgtgggctgcgctatggactattggggccagggaacaagcgtgaccgtgtctagtacgcgtatccagaaccctgatcctgccgtgtaccagctgcgggatagcaagagcagcgacaagagcgtgtgtctgttcaccgacttcgacagccagaccaacgtgtcccagagcaaggactccgacgtgtacatcaccgataagtgcgtgctggacatgcggagcatggacttcaagagcaactccgccgtggcctggtccaacaagtccgatttcgcctgcgccaacgccttcaacaacagcattatccccgaggacacattcttcccaagcagcgacgtgccctgcgacgtgaagctggtggaaaagagcttcgagacagacaccaacctgaacttccagaacctgagcgtgatcggcttcagaatcctgctgctgaaagtggccggctttaacctgctgatgaccctgcggctgtggtccagccgcgccaagagaagcggatctggcgtgaagcagaccctgaatttcgacctgctgaagctggctggcgacgtggaatccaacccaggcccttctagaggccatatgaccgagtacaagcccacggtgcgcctcgccacccgcgacgacgtccccagggccgtacgcaccctcgccgccgcgttcgccgactaccccgccacgcgccacaccgtcgatccggaccgccacatcgagcgggtcaccgagctgcaagaactcttcctcacgcgcgtcgggctcgacatcggcaaggtgtgggtcgcggacgacggcgccgcggtggcggtctggaccacgccggagagcgtcgaagcgggggcggtgttcgccgagatcggcccgcgcatggccgagttgagcggttcccggctggccgcgcagcaacagatggaaggcctcctggcgccgcaccggcccaaggagcccgcgtggttcctggccaccgtcggcgtctcgcccgaccaccagggcaagggtctgggcagcgccgtcgtgctccccggagtggaggcggccgagcgcgccggggtgcccgccttcctggagacctccgcgccccgcaacctccccttctacgagcggctcggcttcaccgtcaccgccgacgtcgaggtgcccgaaggaccgcgcacctggtgcatgacccgcaagcccggtgcctga

SEQ ID NO: 22223 - DNA, 2646 bp, Artificial Sequence
  Synthetic Polynucleotide
atggccttaccagtgaccgccttgctcctgccgctggccttgctgctccacgccgccaggccggacatccagatgacacagagccctagcagcctgtctgccagcgtgggagacagagtgaccatcacatgcaaggccagcgaccacatcaacaactggctggcctggtatcagcagaagcctggacaggcccctaagctgctgatctacggcgctaccacactggaaacaggcgtgcccagcagattttctggcagcggctctggcaccgactacaccctgacaatatccagcctccagcctgaggacttcgccacctactactgtcagcagagctggaacaccccttggacattcggccagggcaccaagctggaaatcaagagactcgaggacctgaagaacgtgttcccacctgaggtggccgtgttcgagcctagcgaggccgagatcagccacacccagaaagccaccctcgtgtgcctggctaccggcttctaccccgaccatgtggaactgtcttggtgggtcaacggcaaagaggtgcacagcggcgtgtgtaccgacccccagccactgaaagaacagcccgccctgaacgacagccggtactgcctgagcagcagactgagagtgtccgccaccttctggcagaacccccggaaccacttcagatgccaggtgcagttctacggcctgagcgagaacgacgagtggacccaggacagagccaagcccgtgacccagatcgtgtctgccgaagcctggggcagagccgattgcggctttaccagcgagagctaccagcagggcgtgctgagcgccaccatcctgtacgagatcctgctgggcaaggccaccctgtacgccgtgctggtgtctgccctggtgctgatggctatggtcaagcggaaggacagccggggaagggccaagcgatctggatctggagcaacaaacttctcactactcaaacaagcaggtgacgtggaggagaatcccgggcctactagtgccaccatggactggatttggcgcatccttttccttgtcggcgctgctaccggcgcccattccgggccccagcttggtccgtatgagctttgggaattgagccacggatccggtccattgggtattgctgggattttcgaacaagttcagcttcaacagcctggcgctgagctggtcaaacctggcgcttctgtgaagatgagctgcaaagccagcggctacgccttcagcagctactggatcaactggatgaagcagaaacccggccagggactcgaatggatcggccaaatctatcccggcgacggcgacaccaactacaacggcaagttcaagggcagagccacactgaccgccgatacctctagcagcacagcctacatgcagctgagcagcctgaccagcgaagatagcgccgtgtacttctgtgcccggtccatcacaacagtcgtgggctgcgctatggactattggggccagggaacaagcgtgaccgtgtctagtacgcgtatccagaaccctgatcctgccgtgtaccagctgcgggatagcaagagcagcgacaagagcgtgtgtctgttcaccgacttcgacagccagaccaacgtgtcccagagcaaggactccgacgtgtacatcaccgataagtgcgtgctggacatgcggagcatggacttcaagagcaactccgccgtggcctggtccaacaagtccgatttcgcctgcgccaacgccttcaacaacagcattatccccgaggacacattcttcccaagccccgagagcagctgcgacgtgaagctggtggaaaagagcttcgagacagacaccaacctgaacttccagaacctgagcgtgatcggcttcagaatcctgctgctgaaagtggccggctttaacctgctgatgaccctgcggctgtggtccagccgcgccaagagaagcggatctggcgtgaagcagaccctgaatttcgacctgctgaagctggctggcgacgtggaatccaacccaggcccttctagaggccatatgaccgagtacaagcccacggtgcgcctcgccacccgcgacgacgtccccagggccgtacgcaccctcgccgccgcgttcgccgactaccccgccacgcgccacaccgtcgatccggaccgccacatcgagcgggtcaccgagctgcaagaactcttcctcacgcgcgtcgggctcgacatcggcaaggtgtgggtcgcggacgacggcgccgcggtggcggtctggaccacgccggagagcgtcgaagcgggggcggtgttcgccgagatcggcccgcgcatggccgagttgagcggttcccggctggccgcgcagcaacagatggaaggcctcctggcgccgcaccggcccaaggagcccgcgtggttcctggccaccgtcggcgtctcgcccgaccaccagggcaagggtctgggcagcgccgtcgtgctccccggagtggaggcggccgagcgcgccggggtgcccgccttcctggagacctccgcgccccgcaacctccccttctacgagcggctcggcttcaccgtcaccgccgacgtcgaggtgcccgaaggaccgcgcacctggtgcatgacccgcaagcccggtgcctga

SEQ ID NO: 22224 - DNA, 2970 bp, Artificial Sequence
  Synthetic Polynucleotide
atggccttaccagtgaccgccttgctcctgccgctggccttgctgctccacgccgccaggccggacatccagatgacacagagccctagcagcctgtctgccagcgtgggagacagagtgaccatcacatgcaaggccagcgaccacatcaacaactggctggcctggtatcagcagaagcctggacaggcccctaagctgctgatctacggcgctaccacactggaaacaggcgtgcccagcagattttctggcagcggctctggcaccgactacaccctgacaatatccagcctccagcctgaggacttcgccacctactactgtcagcagagctggaacaccccttggacattcggccagggcaccaagctggaaatcaagagactcgaggacctgaagaacgtgttcccacctgaggtggccgtgttcgagcctagcgaggccgagatcagccacacccagaaagccaccctcgtgtgcctggctaccggcttctaccccgaccatgtggaactgtcttggtgggtcaacggcaaagaggtgcacagcggcgtgtgtaccgacccccagccactgaaagaacagcccgccctgaacgacagccggtactgcctgagcagcagactgagagtgtccgccaccttctggcagaacccccggaaccacttcagatgccaggtgcagttctacggcctgagcgagaacgacgagtggacccaggacagagccaagcccgtgacccagatcgtgtctgccgaagcctggggcagagccgattgcggctttaccagcgagagctaccagcagggcgtgctgagcgccaccatcctgtacgagatcctgctgggcaaggccaccctgtacgccgtgctggtgtctgccctggtgctgatggctatggtcaagcggaaggacagccggggaagggccaagcgatctggatctggagcaacaaacttctcactactcaaacaagcaggtgacgtggaggagaatcccgggcctactagtgccaccatggactggatttggcgcatccttttccttgtcggcgctgctaccggcgcccattccgggcccgaagtgcaactggttgaatccggtggcggcctggtgcaagcaggcggatctctcagacttagctgtgccgcctccggcagaaccttcacaatgggatggtttaggcaggctccagggaaagagagagagttcgtcgccgccatctctctgtctcccacactggcctactacgccgactctgtgaaaggccggttcaccatctccagagataatgccaagaacaccgtggtgctgcaaatgaactctctgaaacccgaggatacagccctgtactattgtgccgctgaccggaagtccgtgatgagcatcagacccgattactggggacagggcacacaagtcacagtgtcctctggatccgccctgcgaagattgttgggactctttggtttcgaacaagttcagcttcaacagcctggcgctgagctggtcaaacctggcgcttctgtgaagatgagctgcaaagccagcggctacgccttcagcagctactggatcaactggatgaagcagaaacccggccagggactcgaatggatcggccaaatctatcccggcgacggcgacaccaactacaacggcaagttcaagggcagagccacactgaccgccgatacctctagcagcacagcctacatgcagctgagcagcctgaccagcgaagatagcgccgtgtacttctgtgcccggtccatcacaacagtcgtgggctgcgctatggactattggggccagggaacaagcgtgaccgtgtctagtacgcgtatccagaaccctgatcctgccgtgtaccagctgcgggatagcaagagcagcgacaagagcgtgtgtctgttcaccgacttcgacagccagaccaacgtgtcccagagcaaggactccgacgtgtacatcaccgataagtgcgtgctggacatgcggagcatggacttcaagagcaactccgccgtggcctggtccaacaagtccgatttcgcctgcgccaacgccttcaacaacagcattatccccgaggacacattcttcccaagccccgagagcagctgcgacgtgaagctggtggaaaagagcttcgagacagacaccaacctgaacttccagaacctgagcgtgatcggcttcagaatcctgctgctgaaagtggccggctttaacctgctgatgaccctgcggctgtggtccagccgcgccaagagaagcggatctggcgtgaagcagaccctgaatttcgacctgctgaagctggctggcgacgtggaatccaacccaggcccttctagaggccatatgaccgagtacaagcccacggtgcgcctcgccacccgcgacgacgtccccagggccgtacgcaccctcgccgccgcgttcgccgactaccccgccacgcgccacaccgtcgatccggaccgccacatcgagcgggtcaccgagctgcaagaactcttcctcacgcgcgtcgggctcgacatcggcaaggtgtgggtcgcggacgacggcgccgcggtggcggtctggaccacgccggagagcgtcgaagcgggggcggtgttcgccgagatcggcccgcgcatggccgagttgagcggttcccggctggccgcgcagcaacagatggaaggcctcctggcgccgcaccggcccaaggagcccgcgtggttcctggccaccgtcggcgtctcgcccgaccaccagggcaagggtctgggcagcgccgtcgtgctccccggagtggaggcggccgagcgcgccggggtgcccgccttcctggagacctccgcgccccgcaacctccccttctacgagcggctcggcttcaccgtcaccgccgacgtcgaggtgcccgaaggaccgcgcacctggtgcatgacccgcaagcccggtgcctga

SEQ ID NO: 22225 - DNA, 2964 bp, Artificial Sequence
  Synthetic Polynucleotide
atggccttaccagtgaccgccttgctcctgccgctggccttgctgctccacgccgccaggccggacatccagatgacacagagccctagcagcctgtctgccagcgtgggagacagagtgaccatcacatgcaaggccagcgaccacatcaacaactggctggcctggtatcagcagaagcctggacaggcccctaagctgctgatctacggcgctaccacactggaaacaggcgtgcccagcagattttctggcagcggctctggcaccgactacaccctgacaatatccagcctccagcctgaggacttcgccacctactactgtcagcagagctggaacaccccttggacattcggccagggcaccaagctggaaatcaagagactcgaggacctgaagaacgtgttcccacctgaggtggccgtgttcgagcctagcgaggccgagatcagccacacccagaaagccaccctcgtgtgcctggctaccggcttctaccccgaccatgtggaactgtcttggtgggtcaacggcaaagaggtgcacagcggcgtgtgtaccgacccccagccactgaaagaacagcccgccctgaacgacagccggtactgcctgagcagcagactgagagtgtccgccaccttctggcagaacccccggaaccacttcagatgccaggtgcagttctacggcctgagcgagaacgacgagtggacccaggacagagccaagcccgtgacccagatcgtgtctgccgaagcctggggcagagccgattgcggctttaccagcgagagctaccagcagggcgtgctgagcgccaccatcctgtacgagatcctgctgggcaaggccaccctgtacgccgtgctggtgtctgccctggtgctgatggctatggtcaagcggaaggacagccggggaagggccaagcgatctggatctggagcaacaaacttctcactactcaaacaagcaggtgacgtggaggagaatcccgggcctactagtgccaccatggactggatttggcgcatccttttccttgtcggcgctgctaccggcgcccattccgggcccgaagtgcaactggttgaatccggtggcggcctggtgcaagcaggcggatctctcagacttagctgtgccgcctccggcagaaccttcacaatgggatggtttaggcaggctccagggaaagagagagagttcgtcgccgccatctctctgtctcccacactggcctactacgccgactctgtgaaaggccggttcaccatctccagagataatgccaagaacaccgtggtgctgcaaatgaactctctgaaacccgaggatacagccctgtactattgtgccgctgaccggaagtccgtgatgagcatcagacccgattactggggacagggcacacaagtcacagtgtcctctggatccggtccattgggtattgctgggattttcgaacaagttcagcttcaacagcctggcgctgagctggtcaaacctggcgcttctgtgaagatgagctgcaaagccagcggctacgccttcagcagctactggatcaactggatgaagcagaaacccggccagggactcgaatggatcggccaaatctatcccggcgacggcgacaccaactacaacggcaagttcaagggcagagccacactgaccgccgatacctctagcagcacagcctacatgcagctgagcagcctgaccagcgaagatagcgccgtgtacttctgtgcccggtccatcacaacagtcgtgggctgcgctatggactattggggccagggaacaagcgtgaccgtgtctagtacgcgtatccagaaccctgatcctgccgtgtaccagctgcgggatagcaagagcagcgacaagagcgtgtgtctgttcaccgacttcgacagccagaccaacgtgtcccagagcaaggactccgacgtgtacatcaccgataagtgcgtgctggacatgcggagcatggacttcaagagcaactccgccgtggcctggtccaacaagtccgatttcgcctgcgccaacgccttcaacaacagcattatccccgaggacacattcttcccaagccccgagagcagctgcgacgtgaagctggtggaaaagagcttcgagacagacaccaacctgaacttccagaacctgagcgtgatcggcttcagaatcctgctgctgaaagtggccggctttaacctgctgatgaccctgcggctgtggtccagccgcgccaagagaagcggatctggcgtgaagcagaccctgaatttcgacctgctgaagctggctggcgacgtggaatccaacccaggcccttctagaggccatatgaccgagtacaagcccacggtgcgcctcgccacccgcgacgacgtccccagggccgtacgcaccctcgccgccgcgttcgccgactaccccgccacgcgccacaccgtcgatccggaccgccacatcgagcgggtcaccgagctgcaagaactcttcctcacgcgcgtcgggctcgacatcggcaaggtgtgggtcgcggacgacggcgccgcggtggcggtctggaccacgccggagagcgtcgaagcgggggcggtgttcgccgagatcggcccgcgcatggccgagttgagcggttcccggctggccgcgcagcaacagatggaaggcctcctggcgccgcaccggcccaaggagcccgcgtggttcctggccaccgtcggcgtctcgcccgaccaccagggcaagggtctgggcagcgccgtcgtgctccccggagtggaggcggccgagcgcgccggggtgcccgccttcctggagacctccgcgccccgcaacctccccttctacgagcggctcggcttcaccgtcaccgccgacgtcgaggtgcccgaaggaccgcgcacctggtgcatgacccgcaagcccggtgcctga

SEQ ID NO: 22226 - DNA, 3399 bp, Artificial Sequence; identical to SEQ ID NO: 22221
  Synthetic Polynucleotide

SEQ ID NO: 22227 - DNA, 2652 bp, Artificial Sequence
  Synthetic Polynucleotide
atggccttaccagtgaccgccttgctcctgccgctggccttgctgctccacgccgccaggccggacatccagatgacacagagccctagcagcctgtctgccagcgtgggagacagagtgaccatcacatgcaaggccagcgaccacatcaacaactggctggcctggtatcagcagaagcctggacaggcccctaagctgctgatctacggcgctaccacactggaaacaggcgtgcccagcagattttctggcagcggctctggcaccgactacaccctgacaatatccagcctccagcctgaggacttcgccacctactactgtcagcagagctggaacaccccttggacattcggccagggcaccaagctggaaatcaagagactcgaggacctgaagaacgtgttcccacctgaggtggccgtgttcgagcctagcgaggccgagatcagccacacccagaaagccaccctcgtgtgcctggctaccggcttctaccccgaccatgtggaactgtcttggtgggtcaacggcaaagaggtgcacagcggcgtgtgtaccgacccccagccactgaaagaacagcccgccctgaacgacagccggtactgcctgagcagcagactgagagtgtccgccaccttctggcagaacccccggaaccacttcagatgccaggtgcagttctacggcctgagcgagaacgacgagtggacccaggacagagccaagcccgtgacccagatcgtgtctgccgaagcctggggcagagccgattgcggctttaccagcgagagctaccagcagggcgtgctgagcgccaccatcctgtacgagatcctgctgggcaaggccaccctgtacgccgtgctggtgtctgccctggtgctgatggctatggtcaagcggaaggacagccggggaagggccaagcgatctggatctggagcaacaaacttctcactactcaaacaagcaggtgacgtggaggagaatcccgggcctactagtgccaccatggactggatttggcgcatccttttccttgtcggcgctgctaccggcgcccattccgggccccagcttggtccgtatgagctttgggaattgagccacggatccgccctgcgaagattgttgggactctttggtttcgaacaagttcagcttcaacagcctggcgctgagctggtcaaacctggcgcttctgtgaagatgagctgcaaagccagcggctacgccttcagcagctactggatcaactggatgaagcagaaacccggccagggactcgaatggatcggccaaatctatcccggcgacggcgacaccaactacaacggcaagttcaagggcagagccacactgaccgccgatacctctagcagcacagcctacatgcagctgagcagcctgaccagcgaagatagcgccgtgtacttctgtgcccggtccatcacaacagtcgtgggctgcgctatggactattggggccagggaacaagcgtgaccgtgtctagtacgcgtatccagaaccctgatcctgccgtgtaccagctgcgggatagcaagagcagcgacaagagcgtgtgtctgttcaccgacttcgacagccagaccaacgtgtcccagagcaaggactccgacgtgtacatcaccgataagtgcgtgctggacatgcggagcatggacttcaagagcaactccgccgtggcctggtccaacaagtccgatttcgcctgcgccaacgccttcaacaacagcattatccccgaggacacattcttcccaagccccgagagcagctgcgacgtgaagctggtggaaaagagcttcgagacagacaccaacctgaacttccagaacctgagcgtgatcggcttcagaatcctgctgctgaaagtggccggctttaacctgctgatgaccctgcggctgtggtccagccgcgccaagagaagcggatctggcgtgaagcagaccctgaatttcgacctgctgaagctggctggcgacgtggaatccaacccaggcccttctagaggccatatgaccgagtacaagcccacggtgcgcctcgccacccgcgacgacgtccccagggccgtacgcaccctcgccgccgcgttcgccgactaccccgccacgcgccacaccgtcgatccggaccgccacatcgagcgggtcaccgagctgcaagaactcttcctcacgcgcgtcgggctcgacatcggcaaggtgtgggtcgcggacgacggcgccgcggtggcggtctggaccacgccggagagcgtcgaagcgggggcggtgttcgccgagatcggcccgcgcatggccgagttgagcggttcccggctggccgcgcagcaacagatggaaggcctcctggcgccgcaccggcccaaggagcccgcgtggttcctggccaccgtcggcgtctcgcccgaccaccagggcaagggtctgggcagcgccgtcgtgctccccggagtggaggcggccgagcgcgccggggtgcccgccttcctggagacctccgcgccccgcaacctccccttctacgagcggctcggcttcaccgtcaccgccgacgtcgaggtgcccgaaggaccgcgcacctggtgcatgacccgcaagcccggtgcctga

SEQ ID NO: 22228 - DNA, 2667 bp, Artificial Sequence
  Synthetic Polynucleotide
atggccttaccagtgaccgccttgctcctgccgctggccttgctgctccacgccgccaggccggacatccagatgacacagagccctagcagcctgtctgccagcgtgggagacagagtgaccatcacatgcaaggccagcgaccacatcaacaactggctggcctggtatcagcagaagcctggacaggcccctaagctgctgatctacggcgctaccacactggaaacaggcgtgcccagcagattttctggcagcggctctggcaccgactacaccctgacaatatccagcctccagcctgaggacttcgccacctactactgtcagcagagctggaacaccccttggacattcggccagggcaccaagctggaaatcaagagactcgaggacctgaagaacgtgttcccacctgaggtggccgtgttcgagcctagcgaggccgagatcagccacacccagaaagccaccctcgtgtgcctggctaccggcttctaccccgaccatgtggaactgtcttggtgggtcaacggcaaagaggtgcacagcggcgtgtgtaccgacccccagccactgaaagaacagcccgccctgaacgacagccggtactgcctgagcagcagactgagagtgtccgccaccttctggcagaacccccggaaccacttcagatgccaggtgcagttctacggcctgagcgagaacgacgagtggacccaggacagagccaagcccgtgacccagatcgtgtctgccgaagcctggggcagagccgattgcggctttaccagcgagagctaccagcagggcgtgctgagcgccaccatcctgtacgagatcctgctgggcaaggccaccctgtacgccgtgctggtgtctgccctggtgctgatggctatggtcaagcggaaggacagccggggaagggccaagcgatctggatctggagcaacaaacttctcactactcaaacaagcaggtgacgtggaggagaatcccgggcctactagtgccaccatggactggatttggcgcatccttttccttgtcggcgctgctaccggcgcccattccgggccccaagataagctgacgcaatggccaaaatggttggaaggatccggcggcggaggatctggcggaggcggatctgggggcggaggctctttcgaacaagttcagcttcaacagcctggcgctgagctggtcaaacctggcgcttctgtgaagatgagctgcaaagccagcggctacgccttcagcagctactggatcaactggatgaagcagaaacccggccagggactcgaatggatcggccaaatctatcccggcgacggcgacaccaactacaacggcaagttcaagggcagagccacactgaccgccgatacctctagcagcacagcctacatgcagctgagcagcctgaccagcgaagatagcgccgtgtacttctgtgcccggtccatcacaacagtcgtgggctgcgctatggactattggggccagggaacaagcgtgaccgtgtctagtacgcgtatccagaaccctgatcctgccgtgtaccagctgcgggatagcaagagcagcgacaagagcgtgtgtctgttcaccgacttcgacagccagaccaacgtgtcccagagcaaggactccgacgtgtacatcaccgataagtgcgtgctggacatgcggagcatggacttcaagagcaactccgccgtggcctggtccaacaagtccgatttcgcctgcgccaacgccttcaacaacagcattatccccgaggacacattcttcccaagccccgagagcagctgcgacgtgaagctggtggaaaagagcttcgagacagacaccaacctgaacttccagaacctgagcgtgatcggcttcagaatcctgctgctgaaagtggccggctttaacctgctgatgaccctgcggctgtggtccagccgcgccaagagaagcggatctggcgtgaagcagaccctgaatttcgacctgctgaagctggctggcgacgtggaatccaacccaggcccttctagaggccatatgaccgagtacaagcccacggtgcgcctcgccacccgcgacgacgtccccagggccgtacgcaccctcgccgccgcgttcgccgactaccccgccacgcgccacaccgtcgatccggaccgccacatcgagcgggtcaccgagctgcaagaactcttcctcacgcgcgtcgggctcgacatcggcaaggtgtgggtcgcggacgacggcgccgcggtggcggtctggaccacgccggagagcgtcgaagcgggggcggtgttcgccgagatcggcccgcgcatggccgagttgagcggttcccggctggccgcgcagcaacagatggaaggcctcctggcgccgcaccggcccaaggagcccgcgtggttcctggccaccgtcggcgtctcgcccgaccaccagggcaagggtctgggcagcgccgtcgtgctccccggagtggaggcggccgagcgcgccggggtgcccgccttcctggagacctccgcgccccgcaacctccccttctacgagcggctcggcttcaccgtcaccgccgacgtcgaggtgcccgaaggaccgcgcacctggtgcatgacccgcaagcccggtgcctga

SEQ ID NO: 22229 - DNA, 3387 bp, Artificial Sequence; identical to SEQ ID NO: 22220
  Synthetic Polynucleotide

SEQ ID NO: 22230 - DNA, 2841 bp, Artificial Sequence
  Synthetic Polynucleotide
atggccttaccagtgaccgccttgctcctgccgctggccttgctgctccacgccgccaggccggacatccagatgacacagagccctagcagcctgtctgccagcgtgggagacagagtgaccatcacatgcaaggccagcgaccacatcaacaactggctggcctggtatcagcagaagcctggacaggcccctaagctgctgatctacggcgctaccacactggaaacaggcgtgcccagcagattttctggcagcggctctggcaccgactacaccctgacaatatccagcctccagcctgaggacttcgccacctactactgtcagcagagctggaacaccccttggacattcggccagggcaccaagctggaaatcaagagactcgaggacctgaagaacgtgttcccacctgaggtggccgtgttcgagcctagcgaggccgagatcagccacacccagaaagccaccctcgtgtgcctggctaccggcttctaccccgaccatgtggaactgtcttggtgggtcaacggcaaagaggtgcacagcggcgtgtgtaccgacccccagccactgaaagaacagcccgccctgaacgacagccggtactgcctgagcagcagactgagagtgtccgccaccttctggcagaacccccggaaccacttcagatgccaggtgcagttctacggcctgagcgagaacgacgagtggacccaggacagagccaagcccgtgacccagatcgtgtctgccgaagcctggggcagagccgattgcggctttaccagcgagagctaccagcagggcgtgctgagcgccaccatcctgtacgagatcctgctgggcaaggccaccctgtacgccgtgctggtgtctgccctggtgctgatggctatggtcaagcggaaggacagccggggaagggccaagcgatctggatctggagcaacaaacttctcactactcaaacaagcaggtgacgtggaggagaatcccgggcctactagtgccaccatggactggatttggcgcatccttttccttgtcggcgctgctaccggcgcccattccgggccccaggacaagctgacccagtggcctaaatggcttgaaggcggcggaggaagcgagctgcctacacagggcaccttcagcaacgtgtccaccaatgtttctggcggaggcggccaggataagctcacacaatggcccaagtggctggaaggtggtggcggatctgaactgccaactcagggcacattctccaatgtgtctacgaatgtgtctggatccggcggcggaggatctggcggaggcggatctgggggcggaggctctttcgaacaagttcagcttcaacagcctggcgctgagctggtcaaacctggcgcttctgtgaagatgagctgcaaagccagcggctacgccttcagcagctactggatcaactggatgaagcagaaacccggccagggactcgaatggatcggccaaatctatcccggcgacggcgacaccaactacaacggcaagttcaagggcagagccacactgaccgccgatacctctagcagcacagcctacatgcagctgagcagcctgaccagcgaagatagcgccgtgtacttctgtgcccggtccatcacaacagtcgtgggctgcgctatggactattggggccagggaacaagcgtgaccgtgtctagtacgcgtatccagaaccctgatcctgccgtgtaccagctgcgggatagcaagagcagcgacaagagcgtgtgtctgttcaccgacttcgacagccagaccaacgtgtcccagagcaaggactccgacgtgtacatcaccgataagtgcgtgctggacatgcggagcatggacttcaagagcaactccgccgtggcctggtccaacaagtccgatttcgcctgcgccaacgccttcaacaacagcattatccccgaggacacattcttcccaagccccgagagcagctgcgacgtgaagctggtggaaaagagcttcgagacagacaccaacctgaacttccagaacctgagcgtgatcggcttcagaatcctgctgctgaaagtggccggctttaacctgctgatgaccctgcggctgtggtccagccgcgccaagagaagcggatctggcgtgaagcagaccctgaatttcgacctgctgaagctggctggcgacgtggaatccaacccaggcccttctagaggccatatgaccgagtacaagcccacggtgcgcctcgccacccgcgacgacgtccccagggccgtacgcaccctcgccgccgcgttcgccgactaccccgccacgcgccacaccgtcgatccggaccgccacatcgagcgggtcaccgagctgcaagaactcttcctcacgcgcgtcgggctcgacatcggcaaggtgtgggtcgcggacgacggcgccgcggtggcggtctggaccacgccggagagcgtcgaagcgggggcggtgttcgccgagatcggcccgcgcatggccgagttgagcggttcccggctggccgcgcagcaacagatggaaggcctcctggcgccgcaccggcccaaggagcccgcgtggttcctggccaccgtcggcgtctcgcccgaccaccagggcaagggtctgggcagcgccgtcgtgctccccggagtggaggcggccgagcgcgccggggtgcccgccttcctggagacctccgcgccccgcaacctccccttctacgagcggctcggcttcaccgtcaccgccgacgtcgaggtgcccgaaggaccgcgcacctggtgcatgacccgcaagcccggtgcctga

SEQ ID NO: 22231 - DNA, 3069 bp, Artificial Sequence
  Synthetic Polynucleotide
atggccttaccagtgaccgccttgctcctgccgctggccttgctgctccacgccgccaggccggcatgcccccagcttggtccgtatgagctttgggaattgagccacggtaccggcgcgatagggttcctccgaacagcggaattcgacatccagatgacacagagccctagcagcctgtctgccagcgtgggagacagagtgaccatcacatgcaaggccagcgaccacatcaacaactggctggcctggtatcagcagaagcctggacaggcccctaagctgctgatctacggcgctaccacactggaaacaggcgtgcccagcagattttctggcagcggctctggcaccgactacaccctgacaatatccagcctccagcctgaggacttcgccacctactactgtcagcagagctggaacaccccttggacattcggccagggcaccaagctggaaatcaagagactcgaggacctgaagaacgtgttcccacctgaggtggccgtgttcgagcctagcaaggccgagatcgcccacacccagaaagccaccctcgtgtgcctggctaccggcttctaccccgaccatgtggaactgtcttggtgggtcaacggcaaagaggtgcacagcggcgtgtgtaccgacccccagccactgaaagaacagcccgccctgaacgacagccggtactgcctgagcagcagactgagagtgtccgccaccttctggcagaacccccggaaccacttcagatgccaggtgcagttctacggcctgagcgagaacgacgagtggacccaggacagagccaagcccgtgacccagatcgtgtctgccgaagcctggggcagagccgattgcggcatcaccagcgccagctaccaccagggcgtgctgagcgccaccatcctgtacgagatcctgctgggcaaggccaccctgtacgccgtgctggtgtctgccctggtgctgatggctatggtcaagcggaaggacagccggggaagggccaagcgatctggatctggagcaacaaacttctcactactcaaacaagcaggtgacgtggaggagaatcccgggcctactagtgccaccatggactggatttggcgcatccttttccttgtcggcgctgctaccggcgcccattccgggccccaggttcagctgcaagagtctggcggaggacttgctcaagctggcggaagcctgagactgtcttgtgccgcctctggcagaaccttcagcatgggctggtttagacaggcccctggcaaagagagagagttcgtcgccgccatcacatacagcggcggcagcccttactacgcctcttctgtcagaggccggttcaccatcagccgggacaacgccaagaacaccgtgtacctccagatgaacagcctgaagccagaggacaccgccgtgtactactgtgccgccaatccaacctacggcagcgactggaatgccgagaattggggccagggcacccaagtgacagtgtctagtggatccggcggcggaggatctggcggaggcggatctgggggcggaggctctttcgaacaagttcagcttcaacagcctggcgctgagctggtcaaacctggcgcttctgtgaagatgagctgcaaagccagcggctacgccttcagcagctactggatcaactggatgaagcagaaacccggccagggactcgaatggatcggccaaatctatcccggcgacggcgacaccaactacaacggcaagttcaagggcagagccacactgaccgccgatacctctagcagcacagcctacatgcagctgagcagcctgaccagcgaagatagcgccgtgtacttctgtgcccggtccatcacaacagtcgtgggctgcgctatggactattggggccagggaacaagcgtgaccgtgtctagtacgcgtatccagaaccctgatcctgccgtgtaccagctgcgggatagcaagagcagcgacaagagcgtgtgtctgttcaccgacttcgacagccagaccaacgtgtcccagagcaaggactccgacgtgtacatcaccgataagtgcgtgctggacatgcggagcatggacttcaagagcaactccgccgtggcctggtccaacaagtccgatttcgcctgcgccaacgccttcaacaacagcattatccccgaggacacattcttcccaagcagcgacgtgccctgcgacgtgaagctggtggaaaagagcttcgagacagacaccaacctgaacttccagaacctgagcgtgatcggcttcagaatcctgctgctgaaagtggccggctttaacctgctgatgaccctgcggctgtggtccagccgcgccaagagaagcggatctggcgtgaagcagaccctgaatttcgacctgctgaagctggctggcgacgtggaatccaacccaggcccttctagaggccatatgaccgagtacaagcccacggtgcgcctcgccacccgcgacgacgtccccagggccgtacgcaccctcgccgccgcgttcgccgactaccccgccacgcgccacaccgtcgatccggaccgccacatcgagcgggtcaccgagctgcaagaactcttcctcacgcgcgtcgggctcgacatcggcaaggtgtgggtcgcggacgacggcgccgcggtggcggtctggaccacgccggagagcgtcgaagcgggggcggtgttcgccgagatcggcccgcgcatggccgagttgagcggttcccggctggccgcgcagcaacagatggaaggcctcctggcgccgcaccggcccaaggagcccgcgtggttcctggccaccgtcggcgtctcgcccgaccaccagggcaagggtctgggcagcgccgtcgtgctccccggagtggaggcggccgagcgcgccggggtgcccgccttcctggagacctccgcgccccgcaacctccccttctacgagcggctcggcttcaccgtcaccgccgacgtcgaggtgcccgaaggaccgcgcacctggtgcatgacccgcaagcccggtgcctga

SEQ ID NO: 22232 - DNA, 3063 bp, Artificial Sequence; identical to SEQ ID NO: 22222
  Synthetic Polynucleotide

SEQ ID NO: 22233 - DNA, 2700 bp, Artificial Sequence
  Synthetic Polynucleotide
atggccttaccagtgaccgccttgctcctgccgctggccttgctgctccacgccgccaggccggacatccagatgacacagagccctagcagcctgtctgccagcgtgggagacagagtgaccatcacatgcaaggccagcgaccacatcaacaactggctggcctggtatcagcagaagcctggacaggcccctaagctgctgatctacggcgctaccacactggaaacaggcgtgcccagcagattttctggcagcggctctggcaccgactacaccctgacaatatccagcctccagcctgaggacttcgccacctactactgtcagcagagctggaacaccccttggacattcggccagggcaccaagctggaaatcaagagactcgaggacctgaagaacgtgttcccacctgaggtggccgtgttcgagcctagcgaggccgagatcagccacacccagaaagccaccctcgtgtgcctggctaccggcttctaccccgaccatgtggaactgtcttggtgggtcaacggcaaagaggtgcacagcggcgtgtgtaccgacccccagccactgaaagaacagcccgccctgaacgacagccggtactgcctgagcagcagactgagagtgtccgccaccttctggcagaacccccggaaccacttcagatgccaggtgcagttctacggcctgagcgagaacgacgagtggacccaggacagagccaagcccgtgacccagatcgtgtctgccgaagcctggggcagagccgattgcggctttaccagcgagagctaccagcagggcgtgctgagcgccaccatcctgtacgagatcctgctgggcaaggccaccctgtacgccgtgctggtgtctgccctggtgctgatggctatggtcaagcggaaggacagccggggaagggccaagcgatctggatctggagcaacaaacttctcactactcaaacaagcaggtgacgtggaggagaatcccgggcctactagtgccaccatggactggatttggcgcatccttttccttgtcggcgctgctaccggcgcccattccgggccctacatcaacatctacaacgccgagcctgccaatcctagcgagaagaacagccccacacagtacgcctacggatccggcggcggaggatctggcggaggcggatctgggggcggaggctctttcgaacaagttcagcttcaacagcctggcgctgagctggtcaaacctggcgcttctgtgaagatgagctgcaaagccagcggctacgccttcagcagctactggatcaactggatgaagcagaaacccggccagggactcgaatggatcggccaaatctatcccggcgacggcgacaccaactacaacggcaagttcaagggcagagccacactgaccgccgatacctctagcagcacagcctacatgcagctgagcagcctgaccagcgaagatagcgccgtgtacttctgtgcccggtccatcacaacagtcgtgggctgcgctatggactattggggccagggaacaagcgtgaccgtgtctagtacgcgtatccagaaccctgatcctgccgtgtaccagctgcgggatagcaagagcagcgacaagagcgtgtgtctgttcaccgacttcgacagccagaccaacgtgtcccagagcaaggactccgacgtgtacatcaccgataagtgcgtgctggacatgcggagcatggacttcaagagcaactccgccgtggcctggtccaacaagtccgatttcgcctgcgccaacgccttcaacaacagcattatccccgaggacacattcttcccaagccccgagagcagctgcgacgtgaagctggtggaaaagagcttcgagacagacaccaacctgaacttccagaacctgagcgtgatcggcttcagaatcctgctgctgaaagtggccggctttaacctgctgatgaccctgcggctgtggtccagccgcgccaagagaagcggatctggcgtgaagcagaccctgaatttcgacctgctgaagctggctggcgacgtggaatccaacccaggcccttctagaggccatatgaccgagtacaagcccacggtgcgcctcgccacccgcgacgacgtccccagggccgtacgcaccctcgccgccgcgttcgccgactaccccgccacgcgccacaccgtcgatccggaccgccacatcgagcgggtcaccgagctgcaagaactcttcctcacgcgcgtcgggctcgacatcggcaaggtgtgggtcgcggacgacggcgccgcggtggcggtctggaccacgccggagagcgtcgaagcgggggcggtgttcgccgagatcggcccgcgcatggccgagttgagcggttcccggctggccgcgcagcaacagatggaaggcctcctggcgccgcaccggcccaaggagcccgcgtggttcctggccaccgtcggcgtctcgcccgaccaccagggcaagggtctgggcagcgccgtcgtgctccccggagtggaggcggccgagcgcgccggggtgcccgccttcctggagacctccgcgccccgcaacctccccttctacgagcggctcggcttcaccgtcaccgccgacgtcgaggtgcccgaaggaccgcgcacctggtgcatgacccgcaagcccggtgcctga

SEQ ID NO: 22234 - DNA, 2886 bp, Artificial Sequence
  Synthetic Polynucleotide
atggccttaccagtgaccgccttgctcctgccgctggccttgctgctccacgccgccaggccggacatccagatgacacagagccctagcagcctgtctgccagcgtgggagacagagtgaccatcacatgcaaggccagcgaccacatcaacaactggctggcctggtatcagcagaagcctggacaggcccctaagctgctgatctacggcgctaccacactggaaacaggcgtgcccagcagattttctggcagcggctctggcaccgactacaccctgacaatatccagcctccagcctgaggacttcgccacctactactgtcagcagagctggaacaccccttggacattcggccagggcaccaagctggaaatcaagagactcgaggacctgaagaacgtgttcccacctgaggtggccgtgttcgagcctagcgaggccgagatcagccacacccagaaagccaccctcgtgtgcctggctaccggcttctaccccgaccatgtggaactgtcttggtgggtcaacggcaaagaggtgcacagcggcgtgtgtaccgacccccagccactgaaagaacagcccgccctgaacgacagccggtactgcctgagcagcagactgagagtgtccgccaccttctggcagaacccccggaaccacttcagatgccaggtgcagttctacggcctgagcgagaacgacgagtggacccaggacagagccaagcccgtgacccagatcgtgtctgccgaagcctggggcagagccgattgcggctttaccagcgagagctaccagcagggcgtgctgagcgccaccatcctgtacgagatcctgctgggcaaggccaccctgtacgccgtgctggtgtctgccctggtgctgatggctatggtcaagcggaaggacagccggggaagggccaagcgatctggatctggagcaacaaacttctcactactcaaacaagcaggtgacgtggaggagaatcccgggcctactagtgccaccatggactggatttggcgcatccttttccttgtcggcgctgctaccggcgcccattcccagctgggaccttatgagctgtgggagctgtctcacggcagcggctctggatctggatctcagctcggcccttacgaactctgggaactgagccattctggcggcggatctggacagcttggaccctacgagctttgggaactctcccacggatctagcgggcccggctctgggagctgtcaatttgatctgtctacgagacgattgaaatgtgggagtggatcctgccagtttgacctttctacacggagacttaagtgcggatccggcggcggaggatctggcggaggcggatctgggggcggaggctctttcgaacaagttcagcttcaacagcctggcgctgagctggtcaaacctggcgcttctgtgaagatgagctgcaaagccagcggctacgccttcagcagctactggatcaactggatgaagcagaaacccggccagggactcgaatggatcggccaaatctatcccggcgacggcgacaccaactacaacggcaagttcaagggcagagccacactgaccgccgatacctctagcagcacagcctacatgcagctgagcagcctgaccagcgaagatagcgccgtgtacttctgtgcccggtccatcacaacagtcgtgggctgcgctatggactattggggccagggaacaagcgtgaccgtgtctagtacgcgtatccagaaccctgatcctgccgtgtaccagctgcgggatagcaagagcagcgacaagagcgtgtgtctgttcaccgacttcgacagccagaccaacgtgtcccagagcaaggactccgacgtgtacatcaccgataagtgcgtgctggacatgcggagcatggacttcaagagcaactccgccgtggcctggtccaacaagtccgatttcgcctgcgccaacgccttcaacaacagcattatccccgaggacacattcttcccaagccccgagagcagctgcgacgtgaagctggtggaaaagagcttcgagacagacaccaacctgaacttccagaacctgagcgtgatcggcttcagaatcctgctgctgaaagtggccggctttaacctgctgatgaccctgcggctgtggtccagccgcgccaagagaagcggatctggcgtgaagcagaccctgaatttcgacctgctgaagctggctggcgacgtggaatccaacccaggcccttctagaggccatatgaccgagtacaagcccacggtgcgcctcgccacccgcgacgacgtccccagggccgtacgcaccctcgccgccgcgttcgccgactaccccgccacgcgccacaccgtcgatccggaccgccacatcgagcgggtcaccgagctgcaagaactcttcctcacgcgcgtcgggctcgacatcggcaaggtgtgggtcgcggacgacggcgccgcggtggcggtctggaccacgccggagagcgtcgaagcgggggcggtgttcgccgagatcggcccgcgcatggccgagttgagcggttcccggctggccgcgcagcaacagatggaaggcctcctggcgccgcaccggcccaaggagcccgcgtggttcctggccaccgtcggcgtctcgcccgaccaccagggcaagggtctgggcagcgccgtcgtgctccccggagtggaggcggccgagcgcgccggggtgcccgccttcctggagacctccgcgccccgcaacctccccttctacgagcggctcggcttcaccgtcaccgccgacgtcgaggtgcccgaaggaccgcgcacctggtgcatgacccgcaagcccggtgcctga

SEQ ID NO: 22235 - DNA, 2685 bp, Artificial Sequence
  Synthetic Polynucleotide
atggccttaccagtgaccgccttgctcctgccgctggccttgctgctccacgccgccaggccggacatccagatgacacagagccctagcagcctgtctgccagcgtgggagacagagtgaccatcacatgcaaggccagcgaccacatcaacaactggctggcctggtatcagcagaagcctggacaggcccctaagctgctgatctacggcgctaccacactggaaacaggcgtgcccagcagattttctggcagcggctctggcaccgactacaccctgacaatatccagcctccagcctgaggacttcgccacctactactgtcagcagagctggaacaccccttggacattcggccagggcaccaagctggaaatcaagagactcgaggacctgaagaacgtgttcccacctgaggtggccgtgttcgagcctagcgaggccgagatcagccacacccagaaagccaccctcgtgtgcctggctaccggcttctaccccgaccatgtggaactgtcttggtgggtcaacggcaaagaggtgcacagcggcgtgtgtaccgacccccagccactgaaagaacagcccgccctgaacgacagccggtactgcctgagcagcagactgagagtgtccgccaccttctggcagaacccccggaaccacttcagatgccaggtgcagttctacggcctgagcgagaacgacgagtggacccaggacagagccaagcccgtgacccagatcgtgtctgccgaagcctggggcagagccgattgcggctttaccagcgagagctaccagcagggcgtgctgagcgccaccatcctgtacgagatcctgctgggcaaggccaccctgtacgccgtgctggtgtctgccctggtgctgatggctatggtcaagcggaaggacagccggggaagggccaagcgatctggatctggagcaacaaacttctcactactcaaacaagcaggtgacgtggaggagaatcccgggcctactagtgccaccatggactggatttggcgcatccttttccttgtcggcgctgctaccggcgcccattccgggttcctgctgattcaggcttggcccgagaacagaaccgatctgcacgctgggcccagcggatccggcggcggaggatctggcggaggcggatctgggggcggaggctctttcgaacaagttcagcttcaacagcctggcgctgagctggtcaaacctggcgcttctgtgaagatgagctgcaaagccagcggctacgccttcagcagctactggatcaactggatgaagcagaaacccggccagggactcgaatggatcggccaaatctatcccggcgacggcgacaccaactacaacggcaagttcaagggcagagccacactgaccgccgatacctctagcagcacagcctacatgcagctgagcagcctgaccagcgaagatagcgccgtgtacttctgtgcccggtccatcacaacagtcgtgggctgcgctatggactattggggccagggaacaagcgtgaccgtgtctagtacgcgtatccagaaccctgatcctgccgtgtaccagctgcgggatagcaagagcagcgacaagagcgtgtgtctgttcaccgacttcgacagccagaccaacgtgtcccagagcaaggactccgacgtgtacatcaccgataagtgcgtgctggacatgcggagcatggacttcaagagcaactccgccgtggcctggtccaacaagtccgatttcgcctgcgccaacgccttcaacaacagcattatccccgaggacacattcttcccaagccccgagagcagctgcgacgtgaagctggtggaaaagagcttcgagacagacaccaacctgaacttccagaacctgagcgtgatcggcttcagaatcctgctgctgaaagtggccggctttaacctgctgatgaccctgcggctgtggtccagccgcgccaagagaagcggatctggcgtgaagcagaccctgaatttcgacctgctgaagctggctggcgacgtggaatccaacccaggcccttctagaggccatatgaccgagtacaagcccacggtgcgcctcgccacccgcgacgacgtccccagggccgtacgcaccctcgccgccgcgttcgccgactaccccgccacgcgccacaccgtcgatccggaccgccacatcgagcgggtcaccgagctgcaagaactcttcctcacgcgcgtcgggctcgacatcggcaaggtgtgggtcgcggacgacggcgccgcggtggcggtctggaccacgccggagagcgtcgaagcgggggcggtgttcgccgagatcggcccgcgcatggccgagttgagcggttcccggctggccgcgcagcaacagatggaaggcctcctggcgccgcaccggcccaaggagcccgcgtggttcctggccaccgtcggcgtctcgcccgaccaccagggcaagggtctgggcagcgccgtcgtgctccccggagtggaggcggccgagcgcgccggggtgcccgccttcctggagacctccgcgccccgcaacctccccttctacgagcggctcggcttcaccgtcaccgccgacgtcgaggtgcccgaaggaccgcgcacctggtgcatgacccgcaagcccggtgcctga

SEQ ID NO: 22236 - DNA, 2772 bp, Artificial Sequence
  Synthetic Polynucleotide
atggccttaccagtgaccgccttgctcctgccgctggccttgctgctccacgccgccaggccggacatccagatgacacagagccctagcagcctgtctgccagcgtgggagacagagtgaccatcacatgcaaggccagcgaccacatcaacaactggctggcctggtatcagcagaagcctggacaggcccctaagctgctgatctacggcgctaccacactggaaacaggcgtgcccagcagattttctggcagcggctctggcaccgactacaccctgacaatatccagcctccagcctgaggacttcgccacctactactgtcagcagagctggaacaccccttggacattcggccagggcaccaagctggaaatcaagagactcgaggacctgaagaacgtgttcccacctgaggtggccgtgttcgagcctagcgaggccgagatcagccacacccagaaagccaccctcgtgtgcctggctaccggcttctaccccgaccatgtggaactgtcttggtgggtcaacggcaaagaggtgcacagcggcgtgtgtaccgacccccagccactgaaagaacagcccgccctgaacgacagccggtactgcctgagcagcagactgagagtgtccgccaccttctggcagaacccccggaaccacttcagatgccaggtgcagttctacggcctgagcgagaacgacgagtggacccaggacagagccaagcccgtgacccagatcgtgtctgccgaagcctggggcagagccgattgcggctttaccagcgagagctaccagcagggcgtgctgagcgccaccatcctgtacgagatcctgctgggcaaggccaccctgtacgccgtgctggtgtctgccctggtgctgatggctatggtcaagcggaaggacagccggggaagggccaagcgatctggatctggagcaacaaacttctcactactcaaacaagcaggtgacgtggaggagaatcccgggcctactagtgccaccatggactggatttggcgcatccttttccttgtcggcgctgctaccggcgcccattccatctaccctccactgctgagaaccagccaggctatgggctctggagggcccggctctgggagctgtcaatttgatctgtctacgagacgattgaaatgtgggagtggatcctgccagtttgacctttctacacggagacttaagtgcggatccggcggcggaggatctggcggaggcggatctgggggcggaggctctttcgaacaagttcagcttcaacagcctggcgctgagctggtcaaacctggcgcttctgtgaagatgagctgcaaagccagcggctacgccttcagcagctactggatcaactggatgaagcagaaacccggccagggactcgaatggatcggccaaatctatcccggcgacggcgacaccaactacaacggcaagttcaagggcagagccacactgaccgccgatacctctagcagcacagcctacatgcagctgagcagcctgaccagcgaagatagcgccgtgtacttctgtgcccggtccatcacaacagtcgtgggctgcgctatggactattggggccagggaacaagcgtgaccgtgtctagtacgcgtatccagaaccctgatcctgccgtgtaccagctgcgggatagcaagagcagcgacaagagcgtgtgtctgttcaccgacttcgacagccagaccaacgtgtcccagagcaaggactccgacgtgtacatcaccgataagtgcgtgctggacatgcggagcatggacttcaagagcaactccgccgtggcctggtccaacaagtccgatttcgcctgcgccaacgccttcaacaacagcattatccccgaggacacattcttcccaagccccgagagcagctgcgacgtgaagctggtggaaaagagcttcgagacagacaccaacctgaacttccagaacctgagcgtgatcggcttcagaatcctgctgctgaaagtggccggctttaacctgctgatgaccctgcggctgtggtccagccgcgccaagagaagcggatctggcgtgaagcagaccctgaatttcgacctgctgaagctggctggcgacgtggaatccaacccaggcccttctagaggccatatgaccgagtacaagcccacggtgcgcctcgccacccgcgacgacgtccccagggccgtacgcaccctcgccgccgcgttcgccgactaccccgccacgcgccacaccgtcgatccggaccgccacatcgagcgggtcaccgagctgcaagaactcttcctcacgcgcgtcgggctcgacatcggcaaggtgtgggtcgcggacgacggcgccgcggtggcggtctggaccacgccggagagcgtcgaagcgggggcggtgttcgccgagatcggcccgcgcatggccgagttgagcggttcccggctggccgcgcagcaacagatggaaggcctcctggcgccgcaccggcccaaggagcccgcgtggttcctggccaccgtcggcgtctcgcccgaccaccagggcaagggtctgggcagcgccgtcgtgctccccggagtggaggcggccgagcgcgccggggtgcccgccttcctggagacctccgcgccccgcaacctccccttctacgagcggctcggcttcaccgtcaccgccgacgtcgaggtgcccgaaggaccgcgcacctggtgcatgacccgcaagcccggtgcctga

SEQ ID NO: 22237 - DNA, 2772 bp, Artificial Sequence
  Synthetic Polynucleotide
atggccttaccagtgaccgccttgctcctgccgctggccttgctgctccacgccgccaggccggacatccagatgacacagagccctagcagcctgtctgccagcgtgggagacagagtgaccatcacatgcaaggccagcgaccacatcaacaactggctggcctggtatcagcagaagcctggacaggcccctaagctgctgatctacggcgctaccacactggaaacaggcgtgcccagcagattttctggcagcggctctggcaccgactacaccctgacaatatccagcctccagcctgaggacttcgccacctactactgtcagcagagctggaacaccccttggacattcggccagggcaccaagctggaaatcaagagactcgaggacctgaagaacgtgttcccacctgaggtggccgtgttcgagcctagcgaggccgagatcagccacacccagaaagccaccctcgtgtgcctggctaccggcttctaccccgaccatgtggaactgtcttggtgggtcaacggcaaagaggtgcacagcggcgtgtgtaccgacccccagccactgaaagaacagcccgccctgaacgacagccggtactgcctgagcagcagactgagagtgtccgccaccttctggcagaacccccggaaccacttcagatgccaggtgcagttctacggcctgagcgagaacgacgagtggacccaggacagagccaagcccgtgacccagatcgtgtctgccgaagcctggggcagagccgattgcggctttaccagcgagagctaccagcagggcgtgctgagcgccaccatcctgtacgagatcctgctgggcaaggccaccctgtacgccgtgctggtgtctgccctggtgctgatggctatggtcaagcggaaggacagccggggaagggccaagcgatctggatctggagcaacaaacttctcactactcaaacaagcaggtgacgtggaggagaatcccgggcctactagtgccaccatggactggatttggcgcatccttttccttgtcggcgctgctaccggcgcccattccggctgccccaaatgggatgctgcgagatgttctggcgggggttccgggcccggctctgggagctgtcaatttgatctgtctacgagacgattgaaatgtgggagtggatcctgccagtttgacctttctacacggagacttaagtgcggatccggcggcggaggatctggcggaggcggatctgggggcggaggctctttcgaacaagttcagcttcaacagcctggcgctgagctggtcaaacctggcgcttctgtgaagatgagctgcaaagccagcggctacgccttcagcagctactggatcaactggatgaagcagaaacccggccagggactcgaatggatcggccaaatctatcccggcgacggcgacaccaactacaacggcaagttcaagggcagagccacactgaccgccgatacctctagcagcacagcctacatgcagctgagcagcctgaccagcgaagatagcgccgtgtacttctgtgcccggtccatcacaacagtcgtgggctgcgctatggactattggggccagggaacaagcgtgaccgtgtctagtacgcgtatccagaaccctgatcctgccgtgtaccagctgcgggatagcaagagcagcgacaagagcgtgtgtctgttcaccgacttcgacagccagaccaacgtgtcccagagcaaggactccgacgtgtacatcaccgataagtgcgtgctggacatgcggagcatggacttcaagagcaactccgccgtggcctggtccaacaagtccgatttcgcctgcgccaacgccttcaacaacagcattatccccgaggacacattcttcccaagccccgagagcagctgcgacgtgaagctggtggaaaagagcttcgagacagacaccaacctgaacttccagaacctgagcgtgatcggcttcagaatcctgctgctgaaagtggccggctttaacctgctgatgaccctgcggctgtggtccagccgcgccaagagaagcggatctggcgtgaagcagaccctgaatttcgacctgctgaagctggctggcgacgtggaatccaacccaggcccttctagaggccatatgaccgagtacaagcccacggtgcgcctcgccacccgcgacgacgtccccagggccgtacgcaccctcgccgccgcgttcgccgactaccccgccacgcgccacaccgtcgatccggaccgccacatcgagcgggtcaccgagctgcaagaactcttcctcacgcgcgtcgggctcgacatcggcaaggtgtgggtcgcggacgacggcgccgcggtggcggtctggaccacgccggagagcgtcgaagcgggggcggtgttcgccgagatcggcccgcgcatggccgagttgagcggttcccggctggccgcgcagcaacagatggaaggcctcctggcgccgcaccggcccaaggagcccgcgtggttcctggccaccgtcggcgtctcgcccgaccaccagggcaagggtctgggcagcgccgtcgtgctccccggagtggaggcggccgagcgcgccggggtgcccgccttcctggagacctccgcgccccgcaacctccccttctacgagcggctcggcttcaccgtcaccgccgacgtcgaggtgcccgaaggaccgcgcacctggtgcatgacccgcaagcccggtgcctga

SEQ ID NO: 22238 - DNA, 3144 bp, Artificial Sequence
  Synthetic Polynucleotide
atggccttaccagtgaccgccttgctcctgccgctggccttgctgctccacgccgccaggccggacatccagatgacacagagccctagcagcctgtctgccagcgtgggagacagagtgaccatcacatgcaaggccagcgaccacatcaacaactggctggcctggtatcagcagaagcctggacaggcccctaagctgctgatctacggcgctaccacactggaaacaggcgtgcccagcagattttctggcagcggctctggcaccgactacaccctgacaatatccagcctccagcctgaggacttcgccacctactactgtcagcagagctggaacaccccttggacattcggccagggcaccaagctggaaatcaagagactcgaggacctgaagaacgtgttcccacctgaggtggccgtgttcgagcctagcgaggccgagatcagccacacccagaaagccaccctcgtgtgcctggctaccggcttctaccccgaccatgtggaactgtcttggtgggtcaacggcaaagaggtgcacagcggcgtgtgtaccgacccccagccactgaaagaacagcccgccctgaacgacagccggtactgcctgagcagcagactgagagtgtccgccaccttctggcagaacccccggaaccacttcagatgccaggtgcagttctacggcctgagcgagaacgacgagtggacccaggacagagccaagcccgtgacccagatcgtgtctgccgaagcctggggcagagccgattgcggctttaccagcgagagctaccagcagggcgtgctgagcgccaccatcctgtacgagatcctgctgggcaaggccaccctgtacgccgtgctggtgtctgccctggtgctgatggctatggtcaagcggaaggacagccggggaagggccaagcgatctggatctggagcaacaaacttctcactactcaaacaagcaggtgacgtggaggagaatcccgggcctactagtgccaccatggactggatttggcgcatccttttccttgtcggcgctgctaccggcgcccattcccagctgggaccttatgagctgtgggagctgtctcacggcagcggctctggatctggatctcagctcggcccttacgaactctgggaactgagccattctggcggcggatctggacagcttggaccctacgagctttgggaactctcccacggatctagcgggcccgaagtgcagctggttgaatctggcggaggactggttcaggctggcggatctctgagactgtcttgtgccgccagcggcagaacctttagcatgggctggtttagacaggcccctggcaaagagagagagttcgtcgccgccatcacatactctggcggcagcccttactacgccgactctgtgaagggcagattcaccatcagccgggacaacgccaagaacaccgtgtacctccagatgaacagcctgaagcctgaggacaccgccgtgtactactgcgccgccaatccaacatacggcagcgactggaacgccgagaattggggccagggaacccaagtgacagtgtctagcggatccggcggcggaggatctggcggaggcggatctgggggcggaggctctttcgaacaagttcagcttcaacagcctggcgctgagctggtcaaacctggcgcttctgtgaagatgagctgcaaagccagcggctacgccttcagcagctactggatcaactggatgaagcagaaacccggccagggactcgaatggatcggccaaatctatcccggcgacggcgacaccaactacaacggcaagttcaagggcagagccacactgaccgccgatacctctagcagcacagcctacatgcagctgagcagcctgaccagcgaagatagcgccgtgtacttctgtgcccggtccatcacaacagtcgtgggctgcgctatggactattggggccagggaacaagcgtgaccgtgtctagtacgcgtatccagaaccctgatcctgccgtgtaccagctgcgggatagcaagagcagcgacaagagcgtgtgtctgttcaccgacttcgacagccagaccaacgtgtcccagagcaaggactccgacgtgtacatcaccgataagtgcgtgctggacatgcggagcatggacttcaagagcaactccgccgtggcctggtccaacaagtccgatttcgcctgcgccaacgccttcaacaacagcattatccccgaggacacattcttcccaagccccgagagcagctgcgacgtgaagctggtggaaaagagcttcgagacagacaccaacctgaacttccagaacctgagcgtgatcggcttcagaatcctgctgctgaaagtggccggctttaacctgctgatgaccctgcggctgtggtccagccgcgccaagagaagcggatctggcgtgaagcagaccctgaatttcgacctgctgaagctggctggcgacgtggaatccaacccaggcccttctagaggccatatgaccgagtacaagcccacggtgcgcctcgccacccgcgacgacgtccccagggccgtacgcaccctcgccgccgcgttcgccgactaccccgccacgcgccacaccgtcgatccggaccgccacatcgagcgggtcaccgagctgcaagaactcttcctcacgcgcgtcgggctcgacatcggcaaggtgtgggtcgcggacgacggcgccgcggtggcggtctggaccacgccggagagcgtcgaagcgggggcggtgttcgccgagatcggcccgcgcatggccgagttgagcggttcccggctggccgcgcagcaacagatggaaggcctcctggcgccgcaccggcccaaggagcccgcgtggttcctggccaccgtcggcgtctcgcccgaccaccagggcaagggtctgggcagcgccgtcgtgctccccggagtggaggcggccgagcgcgccggggtgcccgccttcctggagacctccgcgccccgcaacctccccttctacgagcggctcggcttcaccgtcaccgccgacgtcgaggtgcccgaaggaccgcgcacctggtgcatgacccgcaagcccggtgcctga

SEQ ID NO: 22239 - DNA, 2802 bp, Artificial Sequence
  Synthetic Polynucleotide
atggccttaccagtgaccgccttgctcctgccgctggccttgctgctccacgccgccaggccggcatgcccctacatcaacatctacaacgccgagcctgccaatcctagcgagaagaacagccccacacagtacgcctacggtaccggcggaggcggatctggcggcggaggtagcggtggcggaggatctgaattcgacatccagatgacacagagccctagcagcctgtctgccagcgtgggagacagagtgaccatcacatgcaaggccagcgaccacatcaacaactggctggcctggtatcagcagaagcctggacaggcccctaagctgctgatctacggcgctaccacactggaaacaggcgtgcccagcagattttctggcagcggctctggcaccgactacaccctgacaatatccagcctccagcctgaggacttcgccacctactactgtcagcagagctggaacaccccttggacattcggccagggcaccaagctggaaatcaagagactcgaggacctgaagaacgtgttcccacctgaggtggccgtgttcgagcctagcgaggccgagatcagccacacccagaaagccaccctcgtgtgcctggctaccggcttctaccccgaccatgtggaactgtcttggtgggtcaacggcaaagaggtgcacagcggcgtgtgtaccgacccccagccactgaaagaacagcccgccctgaacgacagccggtactgcctgagcagcagactgagagtgtccgccaccttctggcagaacccccggaaccacttcagatgccaggtgcagttctacggcctgagcgagaacgacgagtggacccaggacagagccaagcccgtgacccagatcgtgtctgccgaagcctggggcagagccgattgcggctttaccagcgagagctaccagcagggcgtgctgagcgccaccatcctgtacgagatcctgctgggcaaggccaccctgtacgccgtgctggtgtctgccctggtgctgatggctatggtcaagcggaaggacagccggggaagggccaagcgatctggatctggagcaacaaacttctcactactcaaacaagcaggtgacgtggaggagaatcccgggcctactagtgccaccatggactggatttggcgcatccttttccttgtcggcgctgctaccggcgcccattccgggccccagcttggtccgtatgagctttgggaattgagccacggatccggcggcggaggatctggcggaggcggatctgggggcggaggctctttcgaacaagttcagcttcaacagcctggcgctgagctggtcaaacctggcgcttctgtgaagatgagctgcaaagccagcggctacgccttcagcagctactggatcaactggatgaagcagaaacccggccagggactcgaatggatcggccaaatctatcccggcgacggcgacaccaactacaacggcaagttcaagggcagagccacactgaccgccgatacctctagcagcacagcctacatgcagctgagcagcctgaccagcgaagatagcgccgtgtacttctgtgcccggtccatcacaacagtcgtgggctgcgctatggactattggggccagggaacaagcgtgaccgtgtctagtacgcgtatccagaaccctgatcctgccgtgtaccagctgcgggatagcaagagcagcgacaagagcgtgtgtctgttcaccgacttcgacagccagaccaacgtgtcccagagcaaggactccgacgtgtacatcaccgataagtgcgtgctggacatgcggagcatggacttcaagagcaactccgccgtggcctggtccaacaagtccgatttcgcctgcgccaacgccttcaacaacagcattatccccgaggacacattcttcccaagccccgagagcagctgcgacgtgaagctggtggaaaagagcttcgagacagacaccaacctgaacttccagaacctgagcgtgatcggcttcagaatcctgctgctgaaagtggccggctttaacctgctgatgaccctgcggctgtggtccagccgcgccaagagaagcggatctggcgtgaagcagaccctgaatttcgacctgctgaagctggctggcgacgtggaatccaacccaggcccttctagaggccatatgaccgagtacaagcccacggtgcgcctcgccacccgcgacgacgtccccagggccgtacgcaccctcgccgccgcgttcgccgactaccccgccacgcgccacaccgtcgatccggaccgccacatcgagcgggtcaccgagctgcaagaactcttcctcacgcgcgtcgggctcgacatcggcaaggtgtgggtcgcggacgacggcgccgcggtggcggtctggaccacgccggagagcgtcgaagcgggggcggtgttcgccgagatcggcccgcgcatggccgagttgagcggttcccggctggccgcgcagcaacagatggaaggcctcctggcgccgcaccggcccaaggagcccgcgtggttcctggccaccgtcggcgtctcgcccgaccaccagggcaagggtctgggcagcgccgtcgtgctccccggagtggaggcggccgagcgcgccggggtgcccgccttcctggagacctccgcgccccgcaacctccccttctacgagcggctcggcttcaccgtcaccgccgacgtcgaggtgcccgaaggaccgcgcacctggtgcatgacccgcaagcccggtgcctga

SEQ ID NO: 22240 - DNA, 2760 bp, Artificial Sequence
  Synthetic Polynucleotide
atggccttaccagtgaccgccttgctcctgccgctggccttgctgctccacgccgccaggccggacatccagatgacacagagccctagcagcctgtctgccagcgtgggagacagagtgaccatcacatgcaaggccagcgaccacatcaacaactggctggcctggtatcagcagaagcctggacaggcccctaagctgctgatctacggcgctaccacactggaaacaggcgtgcccagcagattttctggcagcggctctggcaccgactacaccctgacaatatccagcctccagcctgaggacttcgccacctactactgtcagcagagctggaacaccccttggacattcggccagggcaccaagctggaaatcaagagactcgaggacctgaagaacgtgttcccacctgaggtggccgtgttcgagcctagcgaggccgagatcagccacacccagaaagccaccctcgtgtgcctggctaccggcttctaccccgaccatgtggaactgtcttggtgggtcaacggcaaagaggtgcacagcggcgtgtgtaccgacccccagccactgaaagaacagcccgccctgaacgacagccggtactgcctgagcagcagactgagagtgtccgccaccttctggcagaacccccggaaccacttcagatgccaggtgcagttctacggcctgagcgagaacgacgagtggacccaggacagagccaagcccgtgacccagatcgtgtctgccgaagcctggggcagagccgattgcggctttaccagcgagagctaccagcagggcgtgctgagcgccaccatcctgtacgagatcctgctgggcaaggccaccctgtacgccgtgctggtgtctgccctggtgctgatggctatggtcaagcggaaggacagccggggaagggccaagcgatctggatctggagcaacaaacttctcactactcaaacaagcaggtgacgtggaggagaatcccgggcctactagtgccaccatggactggatttggcgcatccttttccttgtcggcgctgctaccggcgcccattccgggccctacatcaacatctacaacgccgagcctgccaatcctagcgagaagaacagccccagcacacagtacgcctatggcggcggaagccagctgggaccttatgagctgtgggagctgtctcacggcagcggaggatccggcggcggaggatctggcggaggcggatctgggggcggaggctctttcgaacaagttcagcttcaacagcctggcgctgagctggtcaaacctggcgcttctgtgaagatgagctgcaaagccagcggctacgccttcagcagctactggatcaactggatgaagcagaaacccggccagggactcgaatggatcggccaaatctatcccggcgacggcgacaccaactacaacggcaagttcaagggcagagccacactgaccgccgatacctctagcagcacagcctacatgcagctgagcagcctgaccagcgaagatagcgccgtgtacttctgtgcccggtccatcacaacagtcgtgggctgcgctatggactattggggccagggaacaagcgtgaccgtgtctagtacgcgtatccagaaccctgatcctgccgtgtaccagctgcgggatagcaagagcagcgacaagagcgtgtgtctgttcaccgacttcgacagccagaccaacgtgtcccagagcaaggactccgacgtgtacatcaccgataagtgcgtgctggacatgcggagcatggacttcaagagcaactccgccgtggcctggtccaacaagtccgatttcgcctgcgccaacgccttcaacaacagcattatccccgaggacacattcttcccaagccccgagagcagctgcgacgtgaagctggtggaaaagagcttcgagacagacaccaacctgaacttccagaacctgagcgtgatcggcttcagaatcctgctgctgaaagtggccggctttaacctgctgatgaccctgcggctgtggtccagccgcgccaagagaagcggatctggcgtgaagcagaccctgaatttcgacctgctgaagctggctggcgacgtggaatccaacccaggcccttctagaggccatatgaccgagtacaagcccacggtgcgcctcgccacccgcgacgacgtccccagggccgtacgcaccctcgccgccgcgttcgccgactaccccgccacgcgccacaccgtcgatccggaccgccacatcgagcgggtcaccgagctgcaagaactcttcctcacgcgcgtcgggctcgacatcggcaaggtgtgggtcgcggacgacggcgccgcggtggcggtctggaccacgccggagagcgtcgaagcgggggcggtgttcgccgagatcggcccgcgcatggccgagttgagcggttcccggctggccgcgcagcaacagatggaaggcctcctggcgccgcaccggcccaaggagcccgcgtggttcctggccaccgtcggcgtctcgcccgaccaccagggcaagggtctgggcagcgccgtcgtgctccccggagtggaggcggccgagcgcgccggggtgcccgccttcctggagacctccgcgccccgcaacctccccttctacgagcggctcggcttcaccgtcaccgccgacgtcgaggtgcccgaaggaccgcgcacctggtgcatgacccgcaagcccggtgcctga

SEQ ID NO: 22241 - DNA, 3060 bp, Artificial Sequence
  Synthetic Polynucleotide
atggccttaccagtgaccgccttgctcctgccgctggccttgctgctccacgccgccaggccggacatccagatgacacagagccctagcagcctgtctgccagcgtgggagacagagtgaccatcacatgcaaggccagcgaccacatcaacaactggctggcctggtatcagcagaagcctggacaggcccctaagctgctgatctacggcgctaccacactggaaacaggcgtgcccagcagattttctggcagcggctctggcaccgactacaccctgacaatatccagcctccagcctgaggacttcgccacctactactgtcagcagagctggaacaccccttggacattcggccagggcaccaagctggaaatcaagagactcgaggacctgaagaacgtgttcccacctgaggtggccgtgttcgagcctagcgaggccgagatcagccacacccagaaagccaccctcgtgtgcctggctaccggcttctaccccgaccatgtggaactgtcttggtgggtcaacggcaaagaggtgcacagcggcgtgtgtaccgacccccagccactgaaagaacagcccgccctgaacgacagccggtactgcctgagcagcagactgagagtgtccgccaccttctggcagaacccccggaaccacttcagatgccaggtgcagttctacggcctgagcgagaacgacgagtggacccaggacagagccaagcccgtgacccagatcgtgtctgccgaagcctggggcagagccgattgcggctttaccagcgagagctaccagcagggcgtgctgagcgccaccatcctgtacgagatcctgctgggcaaggccaccctgtacgccgtgctggtgtctgccctggtgctgatggctatggtcaagcggaaggacagccggggaagggccaagcgatctggatctggagcaacaaacttctcactactcaaacaagcaggtgacgtggaggagaatcccgggcctactagtgccaccatggactggatttggcgcatccttttccttgtcggcgctgctaccggcgcccattcctacatcaacatctacaacgccgagcctgccaatcctagcgagaagaacagccccagcacacagtacgcctacggcagcggcagcagctatatcaatatctataatgccgaaccggctaacccctccgaaaagaactcccctagcactcagtatgcttatggctccggcggctcctatattaacatatacaatgctgagcccgcaaatccctccgagaaaaattccccatccacgcaatacgcctatggctctggctccagctcctacattaacatctataacgctgaaccagcaaacccgtctgaaaaaaacagcccctctactcaatatgcctacggatctggcagcgggtcctacatcaatatctacaatgctgaacccgccaatccgagcgaaaaaaactctccatccacacagtatgcatatgggcccagcggatccggcggcggaggatctggcggaggcggatctgggggcggaggctctttcgaacaagttcagcttcaacagcctggcgctgagctggtcaaacctggcgcttctgtgaagatgagctgcaaagccagcggctacgccttcagcagctactggatcaactggatgaagcagaaacccggccagggactcgaatggatcggccaaatctatcccggcgacggcgacaccaactacaacggcaagttcaagggcagagccacactgaccgccgatacctctagcagcacagcctacatgcagctgagcagcctgaccagcgaagatagcgccgtgtacttctgtgcccggtccatcacaacagtcgtgggctgcgctatggactattggggccagggaacaagcgtgaccgtgtctagtacgcgtatccagaaccctgatcctgccgtgtaccagctgcgggatagcaagagcagcgacaagagcgtgtgtctgttcaccgacttcgacagccagaccaacgtgtcccagagcaaggactccgacgtgtacatcaccgataagtgcgtgctggacatgcggagcatggacttcaagagcaactccgccgtggcctggtccaacaagtccgatttcgcctgcgccaacgccttcaacaacagcattatccccgaggacacattcttcccaagccccgagagcagctgcgacgtgaagctggtggaaaagagcttcgagacagacaccaacctgaacttccagaacctgagcgtgatcggcttcagaatcctgctgctgaaagtggccggctttaacctgctgatgaccctgcggctgtggtccagccgcgccaagagaagcggatctggcgtgaagcagaccctgaatttcgacctgctgaagctggctggcgacgtggaatccaacccaggcccttctagaggccatatgaccgagtacaagcccacggtgcgcctcgccacccgcgacgacgtccccagggccgtacgcaccctcgccgccgcgttcgccgactaccccgccacgcgccacaccgtcgatccggaccgccacatcgagcgggtcaccgagctgcaagaactcttcctcacgcgcgtcgggctcgacatcggcaaggtgtgggtcgcggacgacggcgccgcggtggcggtctggaccacgccggagagcgtcgaagcgggggcggtgttcgccgagatcggcccgcgcatggccgagttgagcggttcccggctggccgcgcagcaacagatggaaggcctcctggcgccgcaccggcccaaggagcccgcgtggttcctggccaccgtcggcgtctcgcccgaccaccagggcaagggtctgggcagcgccgtcgtgctccccggagtggaggcggccgagcgcgccggggtgcccgccttcctggagacctccgcgccccgcaacctccccttctacgagcggctcggcttcaccgtcaccgccgacgtcgaggtgcccgaaggaccgcgcacctggtgcatgacccgcaagcccggtgcctga

SEQ ID NO: 22242 - DNA, 2730 bp, Artificial Sequence
  Synthetic Polynucleotide
atggccttaccagtgaccgccttgctcctgccgctggccttgctgctccacgccgccaggccggacatccagatgacacagagccctagcagcctgtctgccagcgtgggagacagagtgaccatcacatgcaaggccagcgaccacatcaacaactggctggcctggtatcagcagaagcctggacaggcccctaagctgctgatctacggcgctaccacactggaaacaggcgtgcccagcagattttctggcagcggctctggcaccgactacaccctgacaatatccagcctccagcctgaggacttcgccacctactactgtcagcagagctggaacaccccttggacattcggccagggcaccaagctggaaatcaagagactcgaggacctgaagaacgtgttcccacctgaggtggccgtgttcgagcctagcgaggccgagatcagccacacccagaaagccaccctcgtgtgcctggctaccggcttctaccccgaccatgtggaactgtcttggtgggtcaacggcaaagaggtgcacagcggcgtgtgtaccgacccccagccactgaaagaacagcccgccctgaacgacagccggtactgcctgagcagcagactgagagtgtccgccaccttctggcagaacccccggaaccacttcagatgccaggtgcagttctacggcctgagcgagaacgacgagtggacccaggacagagccaagcccgtgacccagatcgtgtctgccgaagcctggggcagagccgattgcggctttaccagcgagagctaccagcagggcgtgctgagcgccaccatcctgtacgagatcctgctgggcaaggccaccctgtacgccgtgctggtgtctgccctggtgctgatggctatggtcaagcggaaggacagccggggaagggccaagcgatctggatctggagcaacaaacttctcactactcaaacaagcaggtgacgtggaggagaatcccgggcctactagtgccaccatggactggatttggcgcatccttttccttgtcggcgctgctaccggcgcccattcctgtcaatataacctctctagtagagcactcaaatgcggtggtggtagctgccaatacaatttgagttcccgcgccctgaagtgtggcggtggtagcgggcccagcggatccggcggcggaggatctggcggaggcggatctgggggcggaggctctttcgaacaagttcagcttcaacagcctggcgctgagctggtcaaacctggcgcttctgtgaagatgagctgcaaagccagcggctacgccttcagcagctactggatcaactggatgaagcagaaacccggccagggactcgaatggatcggccaaatctatcccggcgacggcgacaccaactacaacggcaagttcaagggcagagccacactgaccgccgatacctctagcagcacagcctacatgcagctgagcagcctgaccagcgaagatagcgccgtgtacttctgtgcccggtccatcacaacagtcgtgggctgcgctatggactattggggccagggaacaagcgtgaccgtgtctagtacgcgtatccagaaccctgatcctgccgtgtaccagctgcgggatagcaagagcagcgacaagagcgtgtgtctgttcaccgacttcgacagccagaccaacgtgtcccagagcaaggactccgacgtgtacatcaccgataagtgcgtgctggacatgcggagcatggacttcaagagcaactccgccgtggcctggtccaacaagtccgatttcgcctgcgccaacgccttcaacaacagcattatccccgaggacacattcttcccaagccccgagagcagctgcgacgtgaagctggtggaaaagagcttcgagacagacaccaacctgaacttccagaacctgagcgtgatcggcttcagaatcctgctgctgaaagtggccggctttaacctgctgatgaccctgcggctgtggtccagccgcgccaagagaagcggatctggcgtgaagcagaccctgaatttcgacctgctgaagctggctggcgacgtggaatccaacccaggcccttctagaggccatatgaccgagtacaagcccacggtgcgcctcgccacccgcgacgacgtccccagggccgtacgcaccctcgccgccgcgttcgccgactaccccgccacgcgccacaccgtcgatccggaccgccacatcgagcgggtcaccgagctgcaagaactcttcctcacgcgcgtcgggctcgacatcggcaaggtgtgggtcgcggacgacggcgccgcggtggcggtctggaccacgccggagagcgtcgaagcgggggcggtgttcgccgagatcggcccgcgcatggccgagttgagcggttcccggctggccgcgcagcaacagatggaaggcctcctggcgccgcaccggcccaaggagcccgcgtggttcctggccaccgtcggcgtctcgcccgaccaccagggcaagggtctgggcagcgccgtcgtgctccccggagtggaggcggccgagcgcgccggggtgcccgccttcctggagacctccgcgccccgcaacctccccttctacgagcggctcggcttcaccgtcaccgccgacgtcgaggtgcccgaaggaccgcgcacctggtgcatgacccgcaagcccggtgcctga

SEQ ID NO: 22243 - DNA, 3084 bp, Artificial Sequence; identical to SEQ ID NO: 22218
  Synthetic Polynucleotide

SEQ ID NO: 22244 - DNA, 2667 bp, Artificial Sequence; identical to SEQ ID NO: 22219
  Synthetic Polynucleotide

SEQ ID NO: 22245 - DNA, 3387 bp, Artificial Sequence; identical to SEQ ID NO: 22220
  Synthetic Polynucleotide

SEQ ID NO: 22246 - DNA, 3399 bp, Artificial Sequence; identical to SEQ ID NO: 22221
  Synthetic Polynucleotide

SEQ ID NO: 22247 - DNA, 3063 bp, Artificial Sequence; identical to SEQ ID NO: 22222
  Synthetic Polynucleotide

SEQ ID NO: 22248 - DNA, 2646 bp, Artificial Sequence; identical to SEQ ID NO: 22223
  Synthetic Polynucleotide

SEQ ID NO: 22249 - DNA, 2970 bp, Artificial Sequence; identical to SEQ ID NO: 22224
  Synthetic Polynucleotide

SEQ ID NO: 22250 - DNA, 2964 bp, Artificial Sequence; identical to SEQ ID NO: 22225
  Synthetic Polynucleotide

SEQ ID NO: 22251 - DNA, 27 bp, Artificial Sequence
  Synthetic Polynucleotide
ggggggggggggggggggggggggggg

SEQ ID NO: 22252 - DNA, 3147 bp, Artificial Sequence
  Synthetic Polynucleotide
atggccttaccagtgaccgccttgctcctgccgctggccttgctgctccacgccgccaggccggacatccagatgacacagagccctagcagcctgtctgccagcgtgggagacagagtgaccatcacatgcaaggccagcgaccacatcaacaactggctggcctggtatcagcagaagcctggacaggcccctaagctgctgatctacggcgctaccacactggaaacaggcgtgcccagcagattttctggcagcggctctggcaccgactacaccctgacaatatccagcctccagcctgaggacttcgccacctactactgtcagcagagctggaacaccccttggacattcggccagggcaccaagctggaaatcaagagactcgaggacctgaagaacgtgttcccacctgaggtggccgtgttcgagcctagcgaggccgagatcagccacacccagaaagccaccctcgtgtgcctggctaccggcttctaccccgaccatgtggaactgtcttggtgggtcaacggcaaagaggtgcacagcggcgtgtgtaccgacccccagccactgaaagaacagcccgccctgaacgacagccggtactgcctgagcagcagactgagagtgtccgccaccttctggcagaacccccggaaccacttcagatgccaggtgcagttctacggcctgagcgagaacgacgagtggacccaggacagagccaagcccgtgacccagatcgtgtctgccgaagcctggggcagagccgattgcggctttaccagcgagagctaccagcagggcgtgctgagcgccaccatcctgtacgagatcctgctgggcaaggccaccctgtacgccgtgctggtgtctgccctggtgctgatggctatggtcaagcggaaggacagccggggaagggccaagcgatctggatctggagcaacaaacttctcactactcaaacaagcaggtgacgtggaggagaatcccgggcctactagtgccaccatggactggatttggcgcatccttttccttgtcggcgctgctaccggcgcccattccgggcccggactgctggatctgagacagggcatgtttgcccagctggtggcccagaatgtgctgctgattgatggccctctgagctggtacagcgatcctggacttgctggcgttagcctgactggcggcctgagctacaaagaggacaccaaagaactggtggtggctaaggccggcgtgtactacgtgttctttcagctggaactgcggagagtggtggccggcgaaggatctggatctgtgtctctggccctgcacctccagcctcttagatcagctgctggtgctgctgccctggctctgacagttgatctgcctcctgccagcagcgaggccagaaatagcgcctttggcttccaaggcagactgctgcacctgtctgctggacagagactgggagtgcatctgcacacagaggccagagccagacatgcctggcaactgacacagggcgctacagtgctgggcctgtttagagtgacccctgagattcctgccggcctgccttctccaagaagcgaaggatccggcggcggaggatctggcggaggcggatctgggggcggaggctctttcgaacaagttcagcttcaacagcctggcgctgagctggtcaaacctggcgcttctgtgaagatgagctgcaaagccagcggctacgccttcagcagctactggatcaactggatgaagcagaaacccggccagggactcgaatggatcggccaaatctatcccggcgacggcgacaccaactacaacggcaagttcaagggcagagccacactgaccgccgatacctctagcagcacagcctacatgcagctgagcagcctgaccagcgaagatagcgccgtgtacttctgtgcccggtccatcacaacagtcgtgggctgcgctatggactattggggccagggaacaagcgtgaccgtgtctagtacgcgtatccagaaccctgatcctgccgtgtaccagctgcgggatagcaagagcagcgacaagagcgtgtgtctgttcaccgacttcgacagccagaccaacgtgtcccagagcaaggactccgacgtgtacatcaccgataagtgcgtgctggacatgcggagcatggacttcaagagcaactccgccgtggcctggtccaacaagtccgatttcgcctgcgccaacgccttcaacaacagcattatccccgaggacacattcttcccaagccccgagagcagctgcgacgtgaagctggtggaaaagagcttcgagacagacaccaacctgaacttccagaacctgagcgtgatcggcttcagaatcctgctgctgaaagtggccggctttaacctgctgatgaccctgcggctgtggtccagccgcgccaagagaagcggatctggcgtgaagcagaccctgaatttcgacctgctgaagctggctggcgacgtggaatccaacccaggcccttctagaggccatatgaccgagtacaagcccacggtgcgcctcgccacccgcgacgacgtccccagggccgtacgcaccctcgccgccgcgttcgccgactaccccgccacgcgccacaccgtcgatccggaccgccacatcgagcgggtcaccgagctgcaagaactcttcctcacgcgcgtcgggctcgacatcggcaaggtgtgggtcgcggacgacggcgccgcggtggcggtctggaccacgccggagagcgtcgaagcgggggcggtgttcgccgagatcggcccgcgcatggccgagttgagcggttcccggctggccgcgcagcaacagatggaaggcctcctggcgccgcaccggcccaaggagcccgcgtggttcctggccaccgtcggcgtctcgcccgaccaccagggcaagggtctgggcagcgccgtcgtgctccccggagtggaggcggccgagcgcgccggggtgcccgccttcctggagacctccgcgccccgcaacctccccttctacgagcggctcggcttcaccgtcaccgccgacgtcgaggtgcccgaaggaccgcgcacctggtgcatgacccgcaagcccggtgcctga

SEQ ID NO: 22253 - DNA, 3033 bp, Artificial Sequence
  Synthetic Polynucleotide
atggccttaccagtgaccgccttgctcctgccgctggccttgctgctccacgccgccaggccggacatccagatgacacagagccctagcagcctgtctgccagcgtgggagacagagtgaccatcacatgcaaggccagcgaccacatcaacaactggctggcctggtatcagcagaagcctggacaggcccctaagctgctgatctacggcgctaccacactggaaacaggcgtgcccagcagattttctggcagcggctctggcaccgactacaccctgacaatatccagcctccagcctgaggacttcgccacctactactgtcagcagagctggaacaccccttggacattcggccagggcaccaagctggaaatcaagagactcgaggacctgaagaacgtgttcccacctgaggtggccgtgttcgagcctagcgaggccgagatcagccacacccagaaagccaccctcgtgtgcctggctaccggcttctaccccgaccatgtggaactgtcttggtgggtcaacggcaaagaggtgcacagcggcgtgtgtaccgacccccagccactgaaagaacagcccgccctgaacgacagccggtactgcctgagcagcagactgagagtgtccgccaccttctggcagaacccccggaaccacttcagatgccaggtgcagttctacggcctgagcgagaacgacgagtggacccaggacagagccaagcccgtgacccagatcgtgtctgccgaagcctggggcagagccgattgcggctttaccagcgagagctaccagcagggcgtgctgagcgccaccatcctgtacgagatcctgctgggcaaggccaccctgtacgccgtgctggtgtctgccctggtgctgatggctatggtcaagcggaaggacagccggggaagggccaagcgatctggatctggagcaacaaacttctcactactcaaacaagcaggtgacgtggaggagaatcccgggcctactagtgccaccatggactggatttggcgcatccttttccttgtcggcgctgctaccggcgcccattccgggcccgtgctgcacctggtgcctatcaatgccaccagcaaggacgacagcgacgtgaccgaagtgatgtggcagcccgctctgagaagaggcagaggactgcaagcccaaggctacggcgtcagaatccaggatgctggcgtgtacctgctgtatagccaggtgctgttccaggacgtgaccttcacaatgggccaagtggtgtccagagaaggccagggcagacaagagacactgttccggtgcatccggtccatgccttctcaccccgacagagcctacaacagctgctattctgccggcgtgttccatctgcaccagggcgatattctgtccgtgattatccccagagccagggccaagctgaatctgtctcctcacggcacctttctgggcttcgtgaagctgggatccggcggcggaggatctggcggaggcggatctgggggcggaggctctttcgaacaagttcagcttcaacagcctggcgctgagctggtcaaacctggcgcttctgtgaagatgagctgcaaagccagcggctacgccttcagcagctactggatcaactggatgaagcagaaacccggccagggactcgaatggatcggccaaatctatcccggcgacggcgacaccaactacaacggcaagttcaagggcagagccacactgaccgccgatacctctagcagcacagcctacatgcagctgagcagcctgaccagcgaagatagcgccgtgtacttctgtgcccggtccatcacaacagtcgtgggctgcgctatggactattggggccagggaacaagcgtgaccgtgtctagtacgcgtatccagaaccctgatcctgccgtgtaccagctgcgggatagcaagagcagcgacaagagcgtgtgtctgttcaccgacttcgacagccagaccaacgtgtcccagagcaaggactccgacgtgtacatcaccgataagtgcgtgctggacatgcggagcatggacttcaagagcaactccgccgtggcctggtccaacaagtccgatttcgcctgcgccaacgccttcaacaacagcattatccccgaggacacattcttcccaagccccgagagcagctgcgacgtgaagctggtggaaaagagcttcgagacagacaccaacctgaacttccagaacctgagcgtgatcggcttcagaatcctgctgctgaaagtggccggctttaacctgctgatgaccctgcggctgtggtccagccgcgccaagagaagcggatctggcgtgaagcagaccctgaatttcgacctgctgaagctggctggcgacgtggaatccaacccaggcccttctagaggccatatgaccgagtacaagcccacggtgcgcctcgccacccgcgacgacgtccccagggccgtacgcaccctcgccgccgcgttcgccgactaccccgccacgcgccacaccgtcgatccggaccgccacatcgagcgggtcaccgagctgcaagaactcttcctcacgcgcgtcgggctcgacatcggcaaggtgtgggtcgcggacgacggcgccgcggtggcggtctggaccacgccggagagcgtcgaagcgggggcggtgttcgccgagatcggcccgcgcatggccgagttgagcggttcccggctggccgcgcagcaacagatggaaggcctcctggcgccgcaccggcccaaggagcccgcgtggttcctggccaccgtcggcgtctcgcccgaccaccagggcaagggtctgggcagcgccgtcgtgctccccggagtggaggcggccgagcgcgccggggtgcccgccttcctggagacctccgcgccccgcaacctccccttctacgagcggctcggcttcaccgtcaccgccgacgtcgaggtgcccgaaggaccgcgcacctggtgcatgacccgcaagcccggtgcctga

SEQ ID NO: 22254 - DNA, 3450 bp, Artificial Sequence
  Synthetic Polynucleotide
atggccttaccagtgaccgccttgctcctgccgctggccttgctgctccacgccgccaggccggcatgcgtcctgcatctggtccccattaacgccacctccaaggacgattccgatgtcactgaagtcatgtggcaacctgcactgcggagaggaaggggacttcaggctcaaggatatggcgtgcggattcaggacgcaggggtctacctgctctactcccaagtcctgtttcaggatgtcacgtttactatggggcaagtcgtcagccgcgaaggccaaggacgtcaagaaaccctgttcagatgtattcgctctatgcccagccatcctgaccgggcctacaactcctgttatagcgcaggggtgttccacctccatcaaggcgacatcctgtctgtcatcatccctcgggccagagctaaactgaatctgagcccacacggcacattcctcggatttgtgaagctgggtaccggcggaggcggatctggcggcggaggtagcggtggcggaggatctgaattcgacatccagatgacacagagccctagcagcctgtctgccagcgtgggagacagagtgaccatcacatgcaaggccagcgaccacatcaacaactggctggcctggtatcagcagaagcctggacaggcccctaagctgctgatctacggcgctaccacactggaaacaggcgtgcccagcagattttctggcagcggctctggcaccgactacaccctgacaatatccagcctccagcctgaggacttcgccacctactactgtcagcagagctggaacaccccttggacattcggccagggcaccaagctggaaatcaagagactcgaggacctgaagaacgtgttcccacctgaggtggccgtgttcgagcctagcgaggccgagatcagccacacccagaaagccaccctcgtgtgcctggctaccggcttctaccccgaccatgtggaactgtcttggtgggtcaacggcaaagaggtgcacagcggcgtgtgtaccgacccccagccactgaaagaacagcccgccctgaacgacagccggtactgcctgagcagcagactgagagtgtccgccaccttctggcagaacccccggaaccacttcagatgccaggtgcagttctacggcctgagcgagaacgacgagtggacccaggacagagccaagcccgtgacccagatcgtgtctgccgaagcctggggcagagccgattgcggctttaccagcgagagctaccagcagggcgtgctgagcgccaccatcctgtacgagatcctgctgggcaaggccaccctgtacgccgtgctggtgtctgccctggtgctgatggctatggtcaagcggaaggacagccggggaagggccaagcgatctggatctggagcaacaaacttctcactactcaaacaagcaggtgacgtggaggagaatcccgggcctactagtgccaccatggactggatttggcgcatccttttccttgtcggcgctgctaccggcgcccattccgggcccgaagtgcagctggttgaatctggcggaggactggttcaggctggcggatctctgagactgtcttgtgccgccagcggcagaacctttagcatgggctggtttagacaggcccctggcaaagagagagagttcgtcgccgccatcacatactctggcggcagcccttactacgccgactctgtgaagggcagattcaccatcagccgggacaacgccaagaacaccgtgtacctccagatgaacagcctgaagcctgaggacaccgccgtgtactactgcgccgccaatccaacatacggcagcgactggaacgccgagaattggggccagggaacccaagtgacagtgtctagcggatccggcggcggaggatctggcggaggcggatctgggggcggaggctctttcgaacaagttcagcttcaacagcctggcgctgagctggtcaaacctggcgcttctgtgaagatgagctgcaaagccagcggctacgccttcagcagctactggatcaactggatgaagcagaaacccggccagggactcgaatggatcggccaaatctatcccggcgacggcgacaccaactacaacggcaagttcaagggcagagccacactgaccgccgatacctctagcagcacagcctacatgcagctgagcagcctgaccagcgaagatagcgccgtgtacttctgtgcccggtccatcacaacagtcgtgggctgcgctatggactattggggccagggaacaagcgtgaccgtgtctagtacgcgtatccagaaccctgatcctgccgtgtaccagctgcgggatagcaagagcagcgacaagagcgtgtgtctgttcaccgacttcgacagccagaccaacgtgtcccagagcaaggactccgacgtgtacatcaccgataagtgcgtgctggacatgcggagcatggacttcaagagcaactccgccgtggcctggtccaacaagtccgatttcgcctgcgccaacgccttcaacaacagcattatccccgaggacacattcttcccaagccccgagagcagctgcgacgtgaagctggtggaaaagagcttcgagacagacaccaacctgaacttccagaacctgagcgtgatcggcttcagaatcctgctgctgaaagtggccggctttaacctgctgatgaccctgcggctgtggtccagccgcgccaagagaagcggatctggcgtgaagcagaccctgaatttcgacctgctgaagctggctggcgacgtggaatccaacccaggcccttctagaggccatatgaccgagtacaagcccacggtgcgcctcgccacccgcgacgacgtccccagggccgtacgcaccctcgccgccgcgttcgccgactaccccgccacgcgccacaccgtcgatccggaccgccacatcgagcgggtcaccgagctgcaagaactcttcctcacgcgcgtcgggctcgacatcggcaaggtgtgggtcgcggacgacggcgccgcggtggcggtctggaccacgccggagagcgtcgaagcgggggcggtgttcgccgagatcggcccgcgcatggccgagttgagcggttcccggctggccgcgcagcaacagatggaaggcctcctggcgccgcaccggcccaaggagcccgcgtggttcctggccaccgtcggcgtctcgcccgaccaccagggcaagggtctgggcagcgccgtcgtgctccccggagtggaggcggccgagcgcgccggggtgcccgccttcctggagacctccgcgccccgcaacctccccttctacgagcggctcggcttcaccgtcaccgccgacgtcgaggtgcccgaaggaccgcgcacctggtgcatgacccgcaagcccggtgcctga

SEQ ID NO: 22255 - DNA, 27 bp, Artificial Sequence
  Synthetic Polynucleotide
ggggggggggggggggggggggggggg

SEQ ID NO: 22256 - DNA, 3378 bp, Artificial Sequence
  Synthetic Polynucleotide
atgggacccagactgctgttttgggctctgctgtgtctgctcggcacaggacctgttgaagctggcgtgacacagagccccacacacctgattaagaccagaggccagcaggccacactgagatgcagccctatcagcggccacaccagcgtgtactggtatcagcaggctctcggactgggcctccagttcctgctttggtacgacgagggcgaagagagaaaccggggcaacttccctcctcggttttccggcagacagttccccaactacagcagcgagctgaacgtgaacgccctggaactggaagatagcgccctgtacctgtgtgcctcttctcttggtggacctcgcggactggctggactgagaggggatgagcagtttttcggccctggcaccagactgaccgtgctggaaggtaccggcggaggcggatctggcggcggagaattcgacatccagatgacacagagccctagcagcctgtctgccagcgtgggagacagagtgaccatcacatgcaaggccagcgaccacatcaacaactggctggcctggtatcagcagaagcctggacaggcccctaagctgctgatctacggcgctaccacactggaaacaggcgtgcccagcagattttctggcagcggctctggcaccgactacaccctgacaatatccagcctccagcctgaggacttcgccacctactactgtcagcagagctggaacaccccttggacattcggccagggcaccaagctggaaatcaagagactcgaggacctgaagaacgtgttcccacctgaggtggccgtgttcgagcctagcgaggccgagatcagccacacccagaaagccaccctcgtgtgcctggctaccggcttctaccccgaccatgtggaactgtcttggtgggtcaacggcaaagaggtgcacagcggcgtgtgtaccgacccccagccactgaaagaacagcccgccctgaacgacagccggtactgcctgagcagcagactgagagtgtccgccaccttctggcagaacccccggaaccacttcagatgccaggtgcagttctacggcctgagcgagaacgacgagtggacccaggacagagccaagcccgtgacccagatcgtgtctgccgaagcctggggcagagccgattgcggctttaccagcgagagctaccagcagggcgtgctgagcgccaccatcctgtacgagatcctgctgggcaaggccaccctgtacgccgtgctggtgtctgccctggtgctgatggctatggtcaagcggaaggacagccggggaagggccaagcgatctggatctggagcaacaaacttctcactactcaaacaagcaggtgacgtggaggagaatcccgggcctactagtgccaccatggactggatttggcgcatccttttccttgtcggcgctgctaccggcgcccattccgggcccgaagtgcagctggttgaatctggcggaggactggttcaggctggcggatctctgagactgtcttgtgccgccagcggcagaacctttagcatgggctggtttagacaggcccctggcaaagagagagagttcgtcgccgccatcacatactctggcggcagcccttactacgccgactctgtgaagggcagattcaccatcagccgggacaacgccaagaacaccgtgtacctccagatgaacagcctgaagcctgaggacaccgccgtgtactactgcgccgccaatccaacatacggcagcgactggaacgccgagaattggggccagggaacccaagtgacagtgtctagcggatccggcggcggaggatctggcggaggcggatctgggggcggaggctctttcgaacaagttcagcttcaacagcctggcgctgagctggtcaaacctggcgcttctgtgaagatgagctgcaaagccagcggctacgccttcagcagctactggatcaactggatgaagcagaaacccggccagggactcgaatggatcggccaaatctatcccggcgacggcgacaccaactacaacggcaagttcaagggcagagccacactgaccgccgatacctctagcagcacagcctacatgcagctgagcagcctgaccagcgaagatagcgccgtgtacttctgtgcccggtccatcacaacagtcgtgggctgcgctatggactattggggccagggaacaagcgtgaccgtgtctagtacgcgtatccagaaccctgatcctgccgtgtaccagctgcgggatagcaagagcagcgacaagagcgtgtgtctgttcaccgacttcgacagccagaccaacgtgtcccagagcaaggactccgacgtgtacatcaccgataagtgcgtgctggacatgcggagcatggacttcaagagcaactccgccgtggcctggtccaacaagtccgatttcgcctgcgccaacgccttcaacaacagcattatccccgaggacacattcttcccaagccccgagagcagctgcgacgtgaagctggtggaaaagagcttcgagacagacaccaacctgaacttccagaacctgagcgtgatcggcttcagaatcctgctgctgaaagtggccggctttaacctgctgatgaccctgcggctgtggtccagccgcgccaagagaagcggatctggcgtgaagcagaccctgaatttcgacctgctgaagctggctggcgacgtggaatccaacccaggcccttctagaggccatatgaccgagtacaagcccacggtgcgcctcgccacccgcgacgacgtccccagggccgtacgcaccctcgccgccgcgttcgccgactaccccgccacgcgccacaccgtcgatccggaccgccacatcgagcgggtcaccgagctgcaagaactcttcctcacgcgcgtcgggctcgacatcggcaaggtgtgggtcgcggacgacggcgccgcggtggcggtctggaccacgccggagagcgtcgaagcgggggcggtgttcgccgagatcggcccgcgcatggccgagttgagcggttcccggctggccgcgcagcaacagatggaaggcctcctggcgccgcaccggcccaaggagcccgcgtggttcctggccaccgtcggcgtctcgcccgaccaccagggcaagggtctgggcagcgccgtcgtgctccccggagtggaggcggccgagcgcgccggggtgcccgccttcctggagacctccgcgccccgcaacctccccttctacgagcggctcggcttcaccgtcaccgccgacgtcgaggtgcccgaaggaccgcgcacctggtgcatgacccgcaagcccggtgcctga

SEQ ID NO: 22257 - DNA, 3390 bp, Artificial Sequence
  Synthetic Polynucleotide
atgggacccagactgctgttttgggctctgctgtgtctgctcggcacaggacctgttgaagctggcgtgacacagagccccacacacctgattaagaccagaggccagcaggccacactgagatgcagccctatcagcggccacaccagcgtgtactggtatcagcaggctctcggactgggcctccagttcctgctttggtacgacgagggcgaagagagaaaccggggcaacttccctcctcggttttccggcagacagttccccaactacagcagcgagctgaacgtgaacgccctggaactggaagatagcgccctgtacctgtgtgcctcttctcttggtggacctcgcggactggctggactgagaggggatgagcagtttttcggccctggcaccagactgaccgtgctggaaggtaccggcggaggcggatctggcggcggagaattcgacatccagatgacacagagccctagcagcctgtctgccagcgtgggagacagagtgaccatcacatgcaaggccagcgaccacatcaacaactggctggcctggtatcagcagaagcctggacaggcccctaagctgctgatctacggcgctaccacactggaaacaggcgtgcccagcagattttctggcagcggctctggcaccgactacaccctgacaatatccagcctccagcctgaggacttcgccacctactactgtcagcagagctggaacaccccttggacattcggccagggcaccaagctggaaatcaagagactcgagggacagcctaaggccaatcctaccgtgacactgttccctccaagcagcgaagaactccaggccaacaaggccacacttgtgtgcctgatctccgacttctaccctggggctgtgacagtggcttggaaggccgatggatctcctgtgaaagccggcgtggaaaccaccaagccatccaagcagagcaacaacaaatacgccgccagctcctacctgagcctgacacctgagcagtggaagtcccacagatcctacagctgccaagtgacccacgaaggcagcaccgtggaaaagacagtggcccctacagagtgcagcggcagagccgattgcggctttaccagcgagagctaccagcagggcgtgctgagcgccaccatcctgtacgagatcctgctgggcaaggccaccctgtacgccgtgctggtgtctgccctggtgctgatggctatggtcaagcggaaggacagccggggaagggccaagcgatctggatctggagcaacaaacttctcactactcaaacaagcaggtgacgtggaggagaatcccgggcctactagtgccaccatggactggatttggcgcatccttttccttgtcggcgctgctaccggcgcccattccgggccccaggttcagctgcaagagtctggcggaggacttgctcaagctggcggaagcctgagactgtcttgtgccgcctctggcagaaccttcagcatgggctggtttagacaggcccctggcaaagagagagagttcgtcgccgccatcacatacagcggcggcagcccttactacgcctcttctgtcagaggccggttcaccatcagccgggacaacgccaagaacaccgtgtacctccagatgaacagcctgaagccagaggacaccgccgtgtactactgtgccgccaatccaacctacggcagcgactggaatgccgagaattggggccagggcacccaagtgacagtgtctagtggatccggcggcggaggatctggcggaggcggatctgggggcggaggctctttcgaacaagttcagcttcaacagcctggcgctgagctggtcaaacctggcgcttctgtgaagatgagctgcaaagccagcggctacgccttcagcagctactggatcaactggatgaagcagaaacccggccagggactcgaatggatcggccaaatctatcccggcgacggcgacaccaactacaacggcaagttcaagggcagagccacactgaccgccgatacctctagcagcacagcctacatgcagctgagcagcctgaccagcgaagatagcgccgtgtacttctgtgcccggtccatcacaacagtcgtgggctgcgctatggactattggggccagggaacaagcgtgaccgtgtctagtacgcgtgcctctacaaagggaccctccgtgtttcctctggctcccagcagcaagtctacaagcggaggaacagccgctctgggctgcctggtcaaggattactttcccgagcctgtgaccgtgtcctggaatagcggagcactgacaagcggcgtgcacacctttccagccgtgctgcaaagcagcggcctgtactctctgagcagcgtggtcacagtgcctagctctagcctgggcacccagacctacatctgcaatgtgaaccacaagcctagcaacaccaaggtggacaagagagtggaacccaagagctgtatccccgaggacacattcttcccaagccccgagagcagctgcgacgtgaagctggtggaaaagagcttcgagacagacaccaacctgaacttccagaacctgagcgtgatcggcttcagaatcctgctgctgaaagtggccggctttaacctgctgatgaccctgcggctgtggtccagccgcgccaagagaagcggatctggcgtgaagcagaccctgaatttcgacctgctgaagctggctggcgacgtggaatccaacccaggcccttctagaggccatatgaccgagtacaagcccacggtgcgcctcgccacccgcgacgacgtccccagggccgtacgcaccctcgccgccgcgttcgccgactaccccgccacgcgccacaccgtcgatccggaccgccacatcgagcgggtcaccgagctgcaagaactcttcctcacgcgcgtcgggctcgacatcggcaaggtgtgggtcgcggacgacggcgccgcggtggcggtctggaccacgccggagagcgtcgaagcgggggcggtgttcgccgagatcggcccgcgcatggccgagttgagcggttcccggctggccgcgcagcaacagatggaaggcctcctggcgccgcaccggcccaaggagcccgcgtggttcctggccaccgtcggcgtctcgcccgaccaccagggcaagggtctgggcagcgccgtcgtgctccccggagtggaggcggccgagcgcgccggggtgcccgccttcctggagacctccgcgccccgcaacctccccttctacgagcggctcggcttcaccgtcaccgccgacgtcgaggtgcccgaaggaccgcgcacctggtgcatgacccgcaagcccggtgcctga

SEQ ID NO: 22258 - DNA, 3375 bp, Artificial Sequence
  Synthetic Polynucleotide
atgggacccagactgctgttttgggctctgctgtgtctgctcggcacaggacctgttgaagctggcgtgacacagagccccacacacctgattaagaccagaggccagcaggccacactgagatgcagccctatcagcggccacaccagcgtgtactggtatcagcaggctctcggactgggcctccagttcctgctttggtacgacgagggcgaagagagaaaccggggcaacttccctcctcggttttccggcagacagttccccaactacagcagcgagctgaacgtgaacgccctggaactggaagatagcgccctgtacctgtgtgccagctctctcggcggagatgaactgggagccgatggcaacgagcagttctttggccctggcaccagactgaccgtgctggaaggtaccggcggaggcggatctggcggcggaagcgaattcgacatccagatgacacagagccctagcagcctgtctgccagcgtgggagacagagtgaccatcacatgcaaggccagcgaccacatcaacaactggctggcctggtatcagcagaagcctggacaggcccctaagctgctgatctacggcgctaccacactggaaacaggcgtgcccagcagattttctggcagcggctctggcaccgactacaccctgacaatatccagcctccagcctgaggacttcgccacctactactgtcagcagagctggaacaccccttggacattcggccagggcaccaagctggaaatcaagagactcgaggacctgaagaacgtgttcccacctgaggtggccgtgttcgagcctagcaaggccgagatcgcccacacccagaaagccaccctcgtgtgcctggctaccggcttctaccccgaccatgtggaactgtcttggtgggtcaacggcaaagaggtgcacagcggcgtgtgtaccgacccccagccactgaaagaacagcccgccctgaacgacagccggtactgcctgagcagcagactgagagtgtccgccaccttctggcagaacccccggaaccacttcagatgccaggtgcagttctacggcctgagcgagaacgacgagtggacccaggacagagccaagcccgtgacccagatcgtgtctgccgaagcctggggcagagccgattgcggcatcaccagcgccagctaccaccagggcgtgctgagcgccaccatcctgtacgagatcctgctgggcaaggccaccctgtacgccgtgctggtgtctgccctggtgctgatggctatggtcaagcggaaggacagccggggaagggccaagcgatctggatctggagcaacaaacttctcactactcaaacaagcaggtgacgtggaggagaatcccgggcctactagtgccaccatggactggatttggcgcatccttttccttgtcggcgctgctaccggcgcccattccgggccccaggttcagctgcaagagtctggcggaggacttgctcaagctggcggaagcctgagactgtcttgtgccgcctctggcagaaccttcagcatgggctggtttagacaggcccctggcaaagagagagagttcgtcgccgccatcacatacagcggcggcagcccttactacgcctcttctgtcagaggccggttcaccatcagccgggacaacgccaagaacaccgtgtacctccagatgaacagcctgaagccagaggacaccgccgtgtactactgtgccgccaatccaacctacggcagcgactggaatgccgagaattggggccagggcacccaagtgacagtgtctagtggatccggcggcggaggatctggcggaggcggatctgggggcggaggctctttcgaacaagttcagcttcaacagcctggcgctgagctggtcaaacctggcgcttctgtgaagatgagctgcaaagccagcggctacgccttcagcagctactggatcaactggatgaagcagaaacccggccagggactcgaatggatcggccaaatctatcccggcgacggcgacaccaactacaacggcaagttcaagggcagagccacactgaccgccgatacctctagcagcacagcctacatgcagctgagcagcctgaccagcgaagatagcgccgtgtacttctgtgcccggtccatcacaacagtcgtgggctgcgctatggactattggggccagggaacaagcgtgaccgtgtctagtacgcgtatccagaaccctgatcctgccgtgtaccagctgcgggatagcaagagcagcgacaagagcgtgtgtctgttcaccgacttcgacagccagaccaacgtgtcccagagcaaggactccgacgtgtacatcaccgataagtgcgtgctggacatgcggagcatggacttcaagagcaactccgccgtggcctggtccaacaagtccgatttcgcctgcgccaacgccttcaacaacagcattatccccgaggacacattcttcccaagcagcgacgtgccctgcgacgtgaagctggtggaaaagagcttcgagacagacaccaacctgaacttccagaacctgagcgtgatcggcttcagaatcctgctgctgaaagtggccggctttaacctgctgatgaccctgcggctgtggtccagccgcgccaagagaagcggatctggcgtgaagcagaccctgaatttcgacctgctgaagctggctggcgacgtggaatccaacccaggcccttctagaggccatatgaccgagtacaagcccacggtgcgcctcgccacccgcgacgacgtccccagggccgtacgcaccctcgccgccgcgttcgccgactaccccgccacgcgccacaccgtcgatccggaccgccacatcgagcgggtcaccgagctgcaagaactcttcctcacgcgcgtcgggctcgacatcggcaaggtgtgggtcgcggacgacggcgccgcggtggcggtctggaccacgccggagagcgtcgaagcgggggcggtgttcgccgagatcggcccgcgcatggccgagttgagcggttcccggctggccgcgcagcaacagatggaaggcctcctggcgccgcaccggcccaaggagcccgcgtggttcctggccaccgtcggcgtctcgcccgaccaccagggcaagggtctgggcagcgccgtcgtgctccccggagtggaggcggccgagcgcgccggggtgcccgccttcctggagacctccgcgccccgcaacctccccttctacgagcggctcggcttcaccgtcaccgccgacgtcgaggtgcccgaaggaccgcgcacctggtgcatgacccgcaagcccggtgcctga

SEQ ID NO: 22259 - DNA, 3375 bp, Artificial Sequence
  Synthetic Polynucleotide
atgggacccagactgctgttttgggctctgctgtgtctgctcggcacaggacctgttgaagctggcgtgacacagagccccacacacctgattaagaccagaggccagcaggccacactgagatgcagccctatcagcggccacaccagcgtgtactggtatcagcaggctctcggactgggcctccagttcctgctttggtacgacgagggcgaagagagaaaccggggcaacttccctcctcggttttccggcagacagttccccaactacagcagcgagctgaacgtgaacgccctggaactggaagatagcgccctgtacctgtgtgccagctctctcggcggagatgaactgggagccgatggcaacgagcagttctttggccctggcaccagactgaccgtgctggaaggtaccggcggaggcggatctggcggcggaagcgaattcgacatccagatgacacagagccctagcagcctgtctgccagcgtgggagacagagtgaccatcacatgcaaggccagcgaccacatcaacaactggctggcctggtatcagcagaagcctggacaggcccctaagctgctgatctacggcgctaccacactggaaacaggcgtgcccagcagattttctggcagcggctctggcaccgactacaccctgacaatatccagcctccagcctgaggacttcgccacctactactgtcagcagagctggaacaccccttggacattcggccagggcaccaagctggaaatcaagagactcgaggacctgaagaacgtgttcccacctgaggtggccgtgttcgagcctagcgaggccgagatcagccacacccagaaagccaccctcgtgtgcctggctaccggcttctaccccgaccatgtggaactgtcttggtgggtcaacggcaaagaggtgcacagcggcgtgtgtaccgacccccagccactgaaagaacagcccgccctgaacgacagccggtactgcctgagcagcagactgagagtgtccgccaccttctggcagaacccccggaaccacttcagatgccaggtgcagttctacggcctgagcgagaacgacgagtggacccaggacagagccaagcccgtgacccagatcgtgtctgccgaagcctggggcagagccgattgcggctttaccagcgagagctaccagcagggcgtgctgagcgccaccatcctgtacgagatcctgctgggcaaggccaccctgtacgccgtgctggtgtctgccctggtgctgatggctatggtcaagcggaaggacagccggggaagggccaagcgatctggatctggagcaacaaacttctcactactcaaacaagcaggtgacgtggaggagaatcccgggcctactagtgccaccatggactggatttggcgcatccttttccttgtcggcgctgctaccggcgcccattccgggcccgaagtgcagctggttgaatctggcggaggactggttcaggctggcggatctctgagactgtcttgtgccgccagcggcagaacctttagcatgggctggtttagacaggcccctggcaaagagagagagttcgtcgccgccatcacatactctggcggcagcccttactacgccgactctgtgaagggcagattcaccatcagccgggacaacgccaagaacaccgtgtacctccagatgaacagcctgaagcctgaggacaccgccgtgtactactgcgccgccaatccaacatacggcagcgactggaacgccgagaattggggccagggaacccaagtgacagtgtctagcggatccggcggcggaggatctggcggaggcggatctgggggcggaggctctttcgaacaagttcagcttcaacagcctggcgctgagctggtcaaacctggcgcttctgtgaagatgagctgcaaagccagcggctacgccttcagcagctactggatcaactggatgaagcagaaacccggccagggactcgaatggatcggccaaatctatcccggcgacggcgacaccaactacaacggcaagttcaagggcagagccacactgaccgccgatacctctagcagcacagcctacatgcagctgagcagcctgaccagcgaagatagcgccgtgtacttctgtgcccggtccatcacaacagtcgtgggctgcgctatggactattggggccagggaacaagcgtgaccgtgtctagtacgcgtatccagaaccctgatcctgccgtgtaccagctgcgggatagcaagagcagcgacaagagcgtgtgtctgttcaccgacttcgacagccagaccaacgtgtcccagagcaaggactccgacgtgtacatcaccgataagtgcgtgctggacatgcggagcatggacttcaagagcaactccgccgtggcctggtccaacaagtccgatttcgcctgcgccaacgccttcaacaacagcattatccccgaggacacattcttcccaagccccgagagcagctgcgacgtgaagctggtggaaaagagcttcgagacagacaccaacctgaacttccagaacctgagcgtgatcggcttcagaatcctgctgctgaaagtggccggctttaacctgctgatgaccctgcggctgtggtccagccgcgccaagagaagcggatctggcgtgaagcagaccctgaatttcgacctgctgaagctggctggcgacgtggaatccaacccaggcccttctagaggccatatgaccgagtacaagcccacggtgcgcctcgccacccgcgacgacgtccccagggccgtacgcaccctcgccgccgcgttcgccgactaccccgccacgcgccacaccgtcgatccggaccgccacatcgagcgggtcaccgagctgcaagaactcttcctcacgcgcgtcgggctcgacatcggcaaggtgtgggtcgcggacgacggcgccgcggtggcggtctggaccacgccggagagcgtcgaagcgggggcggtgttcgccgagatcggcccgcgcatggccgagttgagcggttcccggctggccgcgcagcaacagatggaaggcctcctggcgccgcaccggcccaaggagcccgcgtggttcctggccaccgtcggcgtctcgcccgaccaccagggcaagggtctgggcagcgccgtcgtgctccccggagtggaggcggccgagcgcgccggggtgcccgccttcctggagacctccgcgccccgcaacctccccttctacgagcggctcggcttcaccgtcaccgccgacgtcgaggtgcccgaaggaccgcgcacctggtgcatgacccgcaagcccggtgcctga

SEQ ID NO: 22260 - DNA, 3453 bp, Artificial Sequence
  Synthetic Polynucleotide
atgggacccagactgctgttttgggctctgctgtgtctgctcggcacaggacctgttgaagctggcgtgacacagagccccacacacctgattaagaccagaggccagcaggccacactgagatgcagccctatcagcggccacaccagcgtgtactggtatcagcaggctctcggactgggcctccagttcctgctttggtacgacgagggcgaagagagaaaccggggcaacttccctcctcggttttccggcagacagttccccaactacagcagcgagctgaacgtgaacgccctggaactggaagatagcgccctgtacctgtgtgccagctctctcggcggagatgaactgggagccgatggcaacgagcagttctttggccctggcaccagactgaccgtgctggaaggtaccggcggaggcggatctggcggcggaagcgaattcgacatccagatgacacagagccctagcagcctgtctgccagcgtgggagacagagtgaccatcacatgcaaggccagcgaccacatcaacaactggctggcctggtatcagcagaagcctggacaggcccctaagctgctgatctacggcgctaccacactggaaacaggcgtgcccagcagattttctggcagcggctctggcaccgactacaccctgacaatatccagcctccagcctgaggacttcgccacctactactgtcagcagagctggaacaccccttggacattcggccagggcaccaagctggaaatcaagagactcgagggacagcctaaggccaatcctaccgtgacactgttccctccaagcagcgaagaactccaggccaacaaggccacacttgtgtgcctgatctccgacttctaccctggggctgtgacagtggcttggaaggccgatggatctcctgtgaaagccggcgtggaaaccaccaagccatccaagcagagcaacaacaaatacgccgccagctcctacctgagcctgacacctgagcagtggaagtcccacagatcctacagctgccaagtgacccacgaaggcagcaccgtggaaaagacagtggcccctacagagtgcagccccatcaagaccgatgtgattacaatggaccccaaggacaactgctccaaggacgccaacgataccctgctgctccagctgaccaacaccagcgcctactacatgtacttgttgctgctgctgaagtccgtggtgtacttcgccatcatcacatgctgcctgctgcggagaaccgccttctgctgcaacggcgagaagtctagggccaagcgatctggatctggagcaacaaacttctcactactcaaacaagcaggtgacgtggaggagaatcccgggcctactagtgccaccatggactggatttggcgcatccttttccttgtcggcgctgctaccggcgcccattccgggccccaggttcagctgcaagagtctggcggaggacttgctcaagctggcggaagcctgagactgtcttgtgccgcctctggcagaaccttcagcatgggctggtttagacaggcccctggcaaagagagagagttcgtcgccgccatcacatacagcggcggcagcccttactacgcctcttctgtcagaggccggttcaccatcagccgggacaacgccaagaacaccgtgtacctccagatgaacagcctgaagccagaggacaccgccgtgtactactgtgccgccaatccaacctacggcagcgactggaatgccgagaattggggccagggcacccaagtgacagtgtctagtggatccggcggcggaggatctggcggaggcggatctgggggcggaggctctttcgaacaagttcagcttcaacagcctggcgctgagctggtcaaacctggcgcttctgtgaagatgagctgcaaagccagcggctacgccttcagcagctactggatcaactggatgaagcagaaacccggccagggactcgaatggatcggccaaatctatcccggcgacggcgacaccaactacaacggcaagttcaagggcagagccacactgaccgccgatacctctagcagcacagcctacatgcagctgagcagcctgaccagcgaagatagcgccgtgtacttctgtgcccggtccatcacaacagtcgtgggctgcgctatggactattggggccagggaacaagcgtgaccgtgtctagtacgcgtgcctctacaaagggaccctccgtgtttcctctggctcccagcagcaagtctacaagcggaggaacagccgctctgggctgcctggtcaaggattactttcccgagcctgtgaccgtgtcctggaatagcggagcactgacaagcggcgtgcacacctttccagccgtgctgcaaagcagcggcctgtactctctgagcagcgtggtcacagtgcctagctctagcctgggcacccagacctacatctgcaatgtgaaccacaagcctagcaacaccaaggtggacaagagagtggaacccaagagctgtgaagtgaaaaccgactccaccgaccacgtgaagcccaaagagacagagaacaccaagcagcccagcaagagctgccacaagcccaaggccatcgtgcacaccgagaaagtgaacatgatgagcctgaccgtgctgggcctgcggatgctgttcgccaaaaccgtggccgtgaacttcctgctgaccgccaagctgttcttcctccgcgccaagagaagcggatctggcgtgaagcagaccctgaatttcgacctgctgaagctggctggcgacgtggaatccaacccaggcccttctagaggccatatgaccgagtacaagcccacggtgcgcctcgccacccgcgacgacgtccccagggccgtacgcaccctcgccgccgcgttcgccgactaccccgccacgcgccacaccgtcgatccggaccgccacatcgagcgggtcaccgagctgcaagaactcttcctcacgcgcgtcgggctcgacatcggcaaggtgtgggtcgcggacgacggcgccgcggtggcggtctggaccacgccggagagcgtcgaagcgggggcggtgttcgccgagatcggcccgcgcatggccgagttgagcggttcccggctggccgcgcagcaacagatggaaggcctcctggcgccgcaccggcccaaggagcccgcgtggttcctggccaccgtcggcgtctcgcccgaccaccagggcaagggtctgggcagcgccgtcgtgctccccggagtggaggcggccgagcgcgccggggtgcccgccttcctggagacctccgcgccccgcaacctccccttctacgagcggctcggcttcaccgtcaccgccgacgtcgaggtgcccgaaggaccgcgcacctggtgcatgacccgcaagcccggtgcctga

SEQ ID NO: 22261 - DNA, 3387 bp, Artificial Sequence
  Synthetic Polynucleotide
atgggacccagactgctgttttgggctctgctgtgtctgctcggcacaggacctgttgaagctggcgtgacacagagccccacacacctgattaagaccagaggccagcaggccacactgagatgcagccctatcagcggccacaccagcgtgtactggtatcagcaggctctcggactgggcctccagttcctgctttggtacgacgagggcgaagagagaaaccggggcaacttccctcctcggttttccggcagacagttccccaactacagcagcgagctgaacgtgaacgccctggaactggaagatagcgccctgtacctgtgtgccagctctctcggcggagatgaactgggagccgatggcaacgagcagttctttggccctggcaccagactgaccgtgctggaaggtaccggcggaggcggatctggcggcggaagcgaattcgacatccagatgacacagagccctagcagcctgtctgccagcgtgggagacagagtgaccatcacatgcaaggccagcgaccacatcaacaactggctggcctggtatcagcagaagcctggacaggcccctaagctgctgatctacggcgctaccacactggaaacaggcgtgcccagcagattttctggcagcggctctggcaccgactacaccctgacaatatccagcctccagcctgaggacttcgccacctactactgtcagcagagctggaacaccccttggacattcggccagggcaccaagctggaaatcaagagactcgagggacagcctaaggccaatcctaccgtgacactgttccctccaagcagcgaagaactccaggccaacaaggccacacttgtgtgcctgatctccgacttctaccctggggctgtgacagtggcttggaaggccgatggatctcctgtgaaagccggcgtggaaaccaccaagccatccaagcagagcaacaacaaatacgccgccagctcctacctgagcctgacacctgagcagtggaagtcccacagatcctacagctgccaagtgacccacgaaggcagcaccgtggaaaagacagtggcccctacagagtgcagcggcagagccgattgcggctttaccagcgagagctaccagcagggcgtgctgagcgccaccatcctgtacgagatcctgctgggcaaggccaccctgtacgccgtgctggtgtctgccctggtgctgatggctatggtcaagcggaaggacagccggggaagggccaagcgatctggatctggagcaacaaacttctcactactcaaacaagcaggtgacgtggaggagaatcccgggcctactagtgccaccatggactggatttggcgcatccttttccttgtcggcgctgctaccggcgcccattccgggccccaggttcagctgcaagagtctggcggaggacttgctcaagctggcggaagcctgagactgtcttgtgccgcctctggcagaaccttcagcatgggctggtttagacaggcccctggcaaagagagagagttcgtcgccgccatcacatacagcggcggcagcccttactacgcctcttctgtcagaggccggttcaccatcagccgggacaacgccaagaacaccgtgtacctccagatgaacagcctgaagccagaggacaccgccgtgtactactgtgccgccaatccaacctacggcagcgactggaatgccgagaattggggccagggcacccaagtgacagtgtctagtggatccggcggcggaggatctggcggaggcggatctgggggcggaggctctttcgaacaagttcagcttcaacagcctggcgctgagctggtcaaacctggcgcttctgtgaagatgagctgcaaagccagcggctacgccttcagcagctactggatcaactggatgaagcagaaacccggccagggactcgaatggatcggccaaatctatcccggcgacggcgacaccaactacaacggcaagttcaagggcagagccacactgaccgccgatacctctagcagcacagcctacatgcagctgagcagcctgaccagcgaagatagcgccgtgtacttctgtgcccggtccatcacaacagtcgtgggctgcgctatggactattggggccagggaacaagcgtgaccgtgtctagtacgcgtgcctctacaaagggaccctccgtgtttcctctggctcccagcagcaagtctacaagcggaggaacagccgctctgggctgcctggtcaaggattactttcccgagcctgtgaccgtgtcctggaatagcggagcactgacaagcggcgtgcacacctttccagccgtgctgcaaagcagcggcctgtactctctgagcagcgtggtcacagtgcctagctctagcctgggcacccagacctacatctgcaatgtgaaccacaagcctagcaacaccaaggtggacaagagagtggaacccaagagctgtatccccgaggacacattcttcccaagccccgagagcagctgcgacgtgaagctggtggaaaagagcttcgagacagacaccaacctgaacttccagaacctgagcgtgatcggcttcagaatcctgctgctgaaagtggccggctttaacctgctgatgaccctgcggctgtggtccagccgcgccaagagaagcggatctggcgtgaagcagaccctgaatttcgacctgctgaagctggctggcgacgtggaatccaacccaggcccttctagaggccatatgaccgagtacaagcccacggtgcgcctcgccacccgcgacgacgtccccagggccgtacgcaccctcgccgccgcgttcgccgactaccccgccacgcgccacaccgtcgatccggaccgccacatcgagcgggtcaccgagctgcaagaactcttcctcacgcgcgtcgggctcgacatcggcaaggtgtgggtcgcggacgacggcgccgcggtggcggtctggaccacgccggagagcgtcgaagcgggggcggtgttcgccgagatcggcccgcgcatggccgagttgagcggttcccggctggccgcgcagcaacagatggaaggcctcctggcgccgcaccggcccaaggagcccgcgtggttcctggccaccgtcggcgtctcgcccgaccaccagggcaagggtctgggcagcgccgtcgtgctccccggagtggaggcggccgagcgcgccggggtgcccgccttcctggagacctccgcgccccgcaacctccccttctacgagcggctcggcttcaccgtcaccgccgacgtcgaggtgcccgaaggaccgcgcacctggtgcatgacccgcaagcccggtgcctga

SEQ ID NO: 22262 - DNA, 3372 bp, Artificial Sequence
  Synthetic Polynucleotide
atgggacccagactgctgttttgggctctgctgtgtctgctcggcacaggacctgttgaagctggcgtgacacagagccccacacacctgattaagaccagaggccagcaggccacactgagatgcagccctatcagcggccacaccagcgtgtactggtatcagcaggctctcggactgggcctccagttcctgctttggtacgacgagggcgaagagagaaaccggggcaacttccctcctcggttttccggcagacagttccccaactacagcagcgagctgaacgtgaacgccctggaactggaagatagcgccctgtacctgtgtgccagctctctcggcggagatgaactgggagccgatggcaacgagcagttctttggccctggcaccagactgaccgtgctggaaggtaccggcggaggcggatctggcggcggaagcgaattcgacatccagatgacacagagccctagcagcctgtctgccagcgtgggagacagagtgaccatcacatgcaaggccagcgaccacatcaacaactggctggcctggtatcagcagaagcctggacaggcccctaagctgctgatctacggcgctaccacactggaaacaggcgtgcccagcagattttctggcagcggctctggcaccgactacaccctgacaatatccagcctccagcctgaggacttcgccacctactactgtcagcagagctggaacaccccttggacattcggccagggcaccaagctggaaatcaagagactcgaggccgacgtgtcccccaagcctaccatcttcctgccctctatcgccgagacaaagctccagaaggccggcacctacctgtgcctgctggaaaagttcttcccagatgtgattaagatccactggcaggaaaagaagtccaacaccatcctgggcagccaggaaggcaacaccatgaagaccaacgacacctacatgaagttcagctggctgaccgtgcccgagaagtccctggacaaagaacacagatgcatcgtgcggcacgaaaacaacaagaacggcgtggaccaggaaatcatcttcccacccatcaagaccgatgtgattacaatggaccccaaggacaactgctccaaggacgccaacgataccctgctgctccagctgaccaacaccagcgcctactacatgtacttgttgctgctgctgaagtccgtggtgtacttcgccatcatcacatgctgcctgctgcggagaaccgccttctgctgcaacggcgagaagtctagggccaagcgatctggatctggagcaacaaacttctcactactcaaacaagcaggtgacgtggaggagaatcccgggcctactagtatggactggatttggcgcatccttttccttgtcggcgctgctaccggcgcgcattccgggccccaggttcagctgcaagagtctggcggaggacttgctcaagctggcggaagcctgagactgtcttgtgccgcctctggcagaaccttcagcatgggctggtttagacaggcccctggcaaagagagagagttcgtcgccgccatcacatacagcggcggcagcccttactacgcctcttctgtcagaggccggttcaccatcagccgggacaacgccaagaacaccgtgtacctccagatgaacagcctgaagccagaggacaccgccgtgtactactgtgccgccaatccaacctacggcagcgactggaatgccgagaattggggccagggcacccaagtgacagtgtctagtggatccggcggcggaggatctggcggaggcggatctgggggcggaggctctttcgaacaagttcagcttcaacagcctggcgctgagctggtcaaacctggcgcttctgtgaagatgagctgcaaagccagcggctacgccttcagcagctactggatcaactggatgaagcagaaacccggccagggactcgaatggatcggccaaatctatcccggcgacggcgacaccaactacaacggcaagttcaagggcagagccacactgaccgccgatacctctagcagcacagcctacatgcagctgagcagcctgaccagcgaagatagcgccgtgtacttctgtgcccggtccatcacaacagtcgtgggctgcgctatggactattggggccagggaacaagcgtgaccgtgtctagtacgcgtcctcacaccaagcccagcgtgttcgtgatgaagaacggcaccaacgtggcctgcctcgtgaaagagttctaccccaaggacatcaggatcaacctggtgtccagcaagaagatcaccgagttcgaccccgccatcgtgatctcccccagcggcaagtacaacgccgtgaagctggggaagtacgaggacagcaacagcgtgacctgctccgtgcagcacgacaacaagaccgtgcacagcaccgactttgaagtgaaaaccgactccaccgaccacgtgaagcccaaagagacagagaacaccaagcagcccagcaagagctgccacaagcccaaggccatcgtgcacaccgagaaagtgaacatgatgagcctgaccgtgctgggcctgcggatgctgttcgccaaaaccgtggccgtgaacttcctgctgaccgccaagctgttcttcctccgcgccaagagaagcggatctggcgtgaagcagaccctgaatttcgacctgctgaagctggctggcgacgtggaatccaacccaggcccttctagaggccatatgaccgagtacaagcccacggtgcgcctcgccacccgcgacgacgtccccagggccgtacgcaccctcgccgccgcgttcgccgactaccccgccacgcgccacaccgtcgatccggaccgccacatcgagcgggtcaccgagctgcaagaactcttcctcacgcgcgtcgggctcgacatcggcaaggtgtgggtcgcggacgacggcgccgcggtggcggtctggaccacgccggagagcgtcgaagcgggggcggtgttcgccgagatcggcccgcgcatggccgagttgagcggttcccggctggccgcgcagcaacagatggaaggcctcctggcgccgcaccggcccaaggagcccgcgtggttcctggccaccgtcggcgtctcgcccgaccaccagggcaagggtctgggcagcgccgtcgtgctccccggagtggaggcggccgagcgcgccggggtgcccgccttcctggagacctccgcgccccgcaacctccccttctacgagcggctcggcttcaccgtcaccgccgacgtcgaggtgcccgaaggaccgcgcacctggtgcatgacccgcaagcccggtgcctga

SEQ ID NO: 22263-22268 - skipped (6 entries)

SEQ ID NO: 22269 - DNA, 2307 bp, Artificial Sequence
  Synthetic Polynucleotide
atggccttaccagtgaccgccttgctcctgccgctggccttgctgctccacgccgccaggccggcatgccaagtcaaactggaagaaagcggtggcggcctggtgcaacctggcgaatctctgagactgagctgtagcgccagcggctccatcttcaaggtgttcagagtgttcgccatgagctggtacaggcaaggccctggcaagcagagagagctggtcgcctctatcagcagcggcgagacaaccacatacgccgaatctgtgaaaggccggttcaccatcagccgggataatgccaagaataccgcctatctccagatggactccctgaagcctgaagatacagctgtgtactactgcaacgccgaccataccttcaccggcgatttttggggccagggaacccaagtgaccgtgtctagtggtaccggcggaggcggatctggcggcggaggtagcggtggcggaggatctgaattcgacatccagatgacacagagccctagcagcctgtctgccagcgtgggagacagagtgaccatcacatgcaaggccagcgaccacatcaacaactggctggcctggtatcagcagaagcctggacaggcccctaagctgctgatctacggcgctaccacactggaaacaggcgtgcccagcagattttctggcagcggctctggcaccgactacaccctgacaatatccagcctccagcctgaggacttcgccacctactactgtcagcagagctggaacaccccttggacattcggccagggcaccaagctggaaatcaagagactcgagatccagaaccctgatcctgccgtgtaccagctgcgggatagcaagagcagcgacaagagcgtgtgtctgttcaccgacttcgacagccagaccaacgtgtcccagagcaaggactccgacgtgtacatcatcgataagtgcgtgctggacatgcggagcatggacttcaagagcaactccgccgtggcctggtccaacaagtccgatttcgcctgcgccaacgccttcaacaacagcattatccccgaggacacattcttcccaagccccgagagcagctgcgacgtgaagctggtggaaaagagcttcgagacagacaccaacctgaacttccagaacctgagcgtgatcggcttcagaatcctgctgctgaaagtggccggctttaacctgctgatgaccctgcggctgtggtccagctctagtcgcgccaagagaagcggatctggcgtgaagcagaccctgaatttcgacctgctgaagctggctggcgacgtggaatccaacccaggccctactagtatggactggatttggcgcatccttttccttgtcggcgctgctaccggcgcgcattccttcgaacaagttcagcttcaacagcctggcgctgagctggtcaaacctggcgcttctgtgaagatgagctgcaaagccagcggctacgccttcagcagctactggatcaactggatgaagcagaaacccggccagggactcgaatggatcggccaaatctatcccggcgacggcgacaccaactacaacggcaagttcaagggcagagccacactgaccgccgatacctctagcagcacagcctacatgcagctgagcagcctgaccagcgaagatagcgccgtgtacttctgtgcccggtccatcacaacagtcgtgggctgcgctatggactattggggccagggaacaagcgtgaccgtgtctagtacgcgtgaggacctgaagaacgtgttcccacctgaggtggccgtgttcgagcctagcgaggccgagatcagccacacccagaaagccaccctcgtgtgcctggctaccggcttctaccccgaccatgtggaactgtcttggtgggtcaacggcaaagaggtgcacagcggcgtgtgtaccgacccccagccactgaaagaacagcccgccctgaacgacagccggtactgcctgagcagcagactgagagtgtccgccaccttctggcagaacccccggaaccacttcagatgccaggtgcagttctacggcctgagcgagaacgacgagtggacccaggacagagccaagcccgtgacccagatcgtgtctgccgaagcctggggcagagccgattgcggctttaccagcgagagctaccagcagggcgtgctgagcgccaccatcctgtacgagatcctgctgggcaaggccaccctgtacgccgtgctggtgtctgccctggtgctgatggctatggtcaagcggaaggacagccggggataa

SEQ ID NO: 22270-22273 - skipped (4 entries)

SEQ ID NO: 22274 - DNA, 27 bp, Artificial Sequence
  Synthetic Polynucleotide
ggggggggggggggggggggggggggg

SEQ ID NO: 22275 - DNA, 2706 bp, Artificial Sequence
  Synthetic Polynucleotide
atggccttaccagtgaccgccttgctcctgccgctggccttgctgctccacgccgccaggccggacatccagatgacacagagccctagcagcctgtctgccagcgtgggagacagagtgaccatcacatgcaaggccagcgaccacatcaacaactggctggcctggtatcagcagaagcctggacaggcccctaagctgctgatctacggcgctaccacactggaaacaggcgtgcccagcagattttctggcagcggctctggcaccgactacaccctgacaatatccagcctccagcctgaggacttcgccacctactactgtcagcagagctggaacaccccttggacattcggccagggcaccaagctggaaatcaagagactcgaggacctgaagaacgtgttcccacctgaggtggccgtgttcgagcctagcgaggccgagatcagccacacccagaaagccaccctcgtgtgcctggctaccggcttctaccccgaccatgtggaactgtcttggtgggtcaacggcaaagaggtgcacagcggcgtgtgtaccgacccccagccactgaaagaacagcccgccctgaacgacagccggtactgcctgagcagcagactgagagtgtccgccaccttctggcagaacccccggaaccacttcagatgccaggtgcagttctacggcctgagcgagaacgacgagtggacccaggacagagccaagcccgtgacccagatcgtgtctgccgaagcctggatccccgaggacacattcttcccaagccccgagagcagctgcgacgtgaagctggtggaaaagagcttcgagacagacaccaacctgaacttccagaacctgagcgtgatcggcttcagaatcctgctgctgaaagtggccggctttaacctgctgatgaccctgcggctgtggtccagccgcgccaagagaagcggatctggcgtgaagcagaccctgaatttcgacctgctgaagctggctggcgacgtggaatccaacccaggcccttctagtatggactggatttggcgcatccttttccttgtcggcgctgctaccggcgcgcattccttcgaacaagttcagcttcaacagcctggcgctgagctggtcaaacctggcgcttctgtgaagatgagctgcaaagccagcggctacgccttcagcagctactggatcaactggatgaagcagaaacccggccagggactcgaatggatcggccaaatctatcccggcgacggcgacaccaactacaacggcaagttcaagggcagagccacactgaccgccgatacctctagcagcacagcctacatgcagctgagcagcctgaccagcgaagatagcgccgtgtacttctgtgcccggtccatcacaacagtcgtgggctgcgctatggactattggggccagggaacaagcgtgaccgtgtctagtacgcgtgaggacctgaagaacgtgttcccacctgaggtggccgtgttcgagcctagcaaggccgagatcgcccacacccagaaagccaccctcgtgtgcctggctaccggcttctaccccgaccatgtggaactgtcttggtgggtcaacggcaaagaggtgcacagcggcgtgtgtaccgacccccagccactgaaagaacagcccgccctgaacgacagccggtactgcctgagcagcagactgagagtgtccgccaccttctggcagaacccccggaaccacttcagatgccaggtgcagttctacggcctgagcgagaacgacgagtggacccaggacagagccaagcccgtgacccagatcgtgtctgccgaagcctggggcagagccgattgcggcatcaccagcgccagctaccaccagggcgtgctgagcgccaccatcctgtacgagatcctgctgggcaaggccaccctgtacgccgtgctggtgtctgccctggtgctgatggctatggtcaagcggaaggacagccggggaagggccaagcgatctggatctggagcaacaaacttctcactactcaaacaagcaggtgacgtggaggagaatcccgggccttctagaggccatatgaccgagtacaagcccacggtgcgcctcgccacccgcgacgacgtccccagggccgtacgcaccctcgccgccgcgttcgccgactaccccgccacgcgccacaccgtcgatccggaccgccacatcgagcgggtcaccgagctgcaagaactcttcctcacgcgcgtcgggctcgacatcggcaaggtgtgggtcgcggacgacggcgccgcggtggcggtctggaccacgccggagagcgtcgaagcgggggcggtgttcgccgagatcggcccgcgcatggccgagttgagcggttcccggctggccgcgcagcaacagatggaaggcctcctggcgccgcaccggcccaaggagcccgcgtggttcctggccaccgtcggcgtctcgcccgaccaccagggcaagggtctgggcagcgccgtcgtgctccccggagtggaggcggccgagcgcgccggggtgcccgccttcctggagacctccgcgccccgcaacctccccttctacgagcggctcggcttcaccgtcaccgccgacgtcgaggtgcccgaaggaccgcgcacctggtgcatgacccgcaagcccggtgcctga

SEQ ID NO: 22276 - DNA, 2706 bp, Artificial Sequence; identical to SEQ ID NO: 22275
  Synthetic Polynucleotide

SEQ ID NO: 22277 - DNA, 2724 bp, Artificial Sequence
  Synthetic Polynucleotide
atggccttaccagtgaccgccttgctcctgccgctggccttgctgctccacgccgccaggccggacatccagatgacacagagccctagcagcctgtctgccagcgtgggagacagagtgaccatcacatgcaaggccagcgaccacatcaacaactggctggcctggtatcagcagaagcctggacaggcccctaagctgctgatctacggcgctaccacactggaaacaggcgtgcccagcagattttctggcagcggctctggcaccgactacaccctgacaatatccagcctccagcctgaggacttcgccacctactactgtcagcagagctggaacaccccttggacattcggccagggcaccaagctggaaatcaagagactcgaggggaaaccaattcccaaccctcttctgggactggattcaaccggcagcggcgacaagcagctggacgccgacgtgtcccccaagcctaccatcttcctgccctctatcgccgagacaaagctccagaaggccggcacctacctgtgcctgctggaaaagttcttcccagatgtgattaagatccactggcaggaaaagaagtccaacaccatcctgggcagccaggaaggcaacaccatgaagaccaacgacacctacatgaagttcagctggctgaccgtgcccgagaagtccctggacaaagaacacagatgcatcgtgcggcacgaaaacaacaagaacggcgtggaccaggaaatcatcttcccagaagtgaaaaccgactccaccgaccacgtgaagcccaaagagacagagaacaccaagcagcccagcaagagctgccacaagcccaaggccatcgtgcacaccgagaaagtgaacatgatgagcctgaccgtgctgggcctgcggatgctgttcgccaaaaccgtggccgtgaacttcctgctgaccgccaagctgttcttcctccgcgccaagagaagcggatctggcgtgaagcagaccctgaatttcgacctgctgaagctggctggcgacgtggaatccaacccaggcccttctagtatggactggatttggcgcatccttttccttgtcggcgctgctaccggcgcgcattccttcgaacaagttcagcttcaacagcctggcgctgagctggtcaaacctggcgcttctgtgaagatgagctgcaaagccagcggctacgccttcagcagctactggatcaactggatgaagcagaaacccggccagggactcgaatggatcggccaaatctatcccggcgacggcgacaccaactacaacggcaagttcaagggcagagccacactgaccgccgatacctctagcagcacagcctacatgcagctgagcagcctgaccagcgaagatagcgccgtgtacttctgtgcccggtccatcacaacagtcgtgggctgcgctatggactattggggccagggaacaagcgtgaccgtgtctagtacgcgtgaggacctgaagaacgtgttcccacctgaggtggccgtgttcgagcctagcaaggccgagatcgcccacacccagaaagccaccctcgtgtgcctggctaccggcttctaccccgaccatgtggaactgtcttggtgggtcaacggcaaagaggtgcacagcggcgtgtgtaccgacccccagccactgaaagaacagcccgccctgaacgacagccggtactgcctgagcagcagactgagagtgtccgccaccttctggcagaacccccggaaccacttcagatgccaggtgcagttctacggcctgagcgagaacgacgagtggacccaggacagagccaagcccgtgacccagatcgtgtctgccgaagcctggggcagagccgattgcggcatcaccagcgccagctaccaccagggcgtgctgagcgccaccatcctgtacgagatcctgctgggcaaggccaccctgtacgccgtgctggtgtctgccctggtgctgatggctatggtcaagcggaaggacagccggggaagggccaagcgatctggatctggagcaacaaacttctcactactcaaacaagcaggtgacgtggaggagaatcccgggccttctagaggccatatgaccgagtacaagcccacggtgcgcctcgccacccgcgacgacgtccccagggccgtacgcaccctcgccgccgcgttcgccgactaccccgccacgcgccacaccgtcgatccggaccgccacatcgagcgggtcaccgagctgcaagaactcttcctcacgcgcgtcgggctcgacatcggcaaggtgtgggtcgcggacgacggcgccgcggtggcggtctggaccacgccggagagcgtcgaagcgggggcggtgttcgccgagatcggcccgcgcatggccgagttgagcggttcccggctggccgcgcagcaacagatggaaggcctcctggcgccgcaccggcccaaggagcccgcgtggttcctggccaccgtcggcgtctcgcccgaccaccagggcaagggtctgggcagcgccgtcgtgctccccggagtggaggcggccgagcgcgccggggtgcccgccttcctggagacctccgcgccccgcaacctccccttctacgagcggctcggcttcaccgtcaccgccgacgtcgaggtgcccgaaggaccgcgcacctggtgcatgacccgcaagcccggtgcctga

SEQ ID NO: 22278 - DNA, 2499 bp, Artificial Sequence
  Synthetic Polynucleotide
atggccttaccagtgaccgccttgctcctgccgctggccttgctgctccacgccgccaggccggacatccagatgacacagagccctagcagcctgtctgccagcgtgggagacagagtgaccatcacatgcaaggccagcgaccacatcaacaactggctggcctggtatcagcagaagcctggacaggcccctaagctgctgatctacggcgctaccacactggaaacaggcgtgcccagcagattttctggcagcggctctggcaccgactacaccctgacaatatccagcctccagcctgaggacttcgccacctactactgtcagcagagctggaacaccccttggacattcggccagggcaccaagctggaaatcaagagactcgagatccagaaccctgatcctgccgtgtaccagctgcgggatagcaagagcagcgacaagagcgtgtgtctgttcaccgacttcgacagccagaccaacgtgtcccagagcaaggactccgacgtgtacatcaccgataagtgcgtgctggacatgcggagcatggacttcaagagcaactccgccgtggcctggtccaacaagtccgatttcgcctgcgccaacgccttcaacaacagcattatccccgaggacacattcttcccaagcagcgacgtgccctgcgacgtgaagctggtggaaaagagcttcgagacagacaccaacctgaacttccagaacctgagcgtgatcggcttcagaatcctgctgctgaaagtggccggctttaacctgctgatgaccctgcggctgtggtccagccgcgccaagagaagcggatctggcgtgaagcagaccctgaatttcgacctgctgaagctggctggcgacgtggaatccaacccaggccctactagtatggactggatttggcgcatccttttccttgtcggcgctgctaccggcgcgcattccttcgaacaagttcagcttcaacagcctggcgctgagctggtcaaacctggcgcttctgtgaagatgagctgcaaagccagcggctacgccttcagcagctactggatcaactggatgaagcagaaacccggccagggactcgaatggatcggccaaatctatcccggcgacggcgacaccaactacaacggcaagttcaagggcagagccacactgaccgccgatacctctagcagcacagcctacatgcagctgagcagcctgaccagcgaagatagcgccgtgtacttctgtgcccggtccatcacaacagtcgtgggctgcgctatggactattggggccagggaacaagcgtgaccgtgtctagtacgcgtatccagaaccctgatcctgccgtgtaccagctgcgggatagcaagagcagcgacaagagcgtgtgtctgttcaccgacttcgacagccagaccaacgtgtcccagagcaaggactccgacgtgtacatcaccgataagtgcgtgctggacatgcggagcatggacttcaagagcaactccgccgtggcctggtccaacaagtccgatttcgcctgcgccaacgccttcaacaacagcattggcagagccgattgcggctttaccagcgagagctaccagcagggcgtgctgagcgccaccatcctgtacgagatcctgctgggcaaggccaccctgtacgccgtgctggtgtctgccctggtgctgatggctatggtcaagcggaaggacagccggggaagggccaagcgatctggatctggagcaacaaacttctcactactcaaacaagcaggtgacgtggaggagaatcccgggcctactagtatggactggatttggcgcatccttttccttgtcggcgctgctaccggcgcgcattccttcgctagaggccatatgaccgagtacaagcccacggtgcgcctcgccacccgcgacgacgtccccagggccgtacgcaccctcgccgccgcgttcgccgactaccccgccacgcgccacaccgtcgatccggaccgccacatcgagcgggtcaccgagctgcaagaactcttcctcacgcgcgtcgggctcgacatcggcaaggtgtgggtcgcggacgacggcgccgcggtggcggtctggaccacgccggagagcgtcgaagcgggggcggtgttcgccgagatcggcccgcgcatggccgagttgagcggttcccggctggccgcgcagcaacagatggaaggcctcctggcgccgcaccggcccaaggagcccgcgtggttcctggccaccgtcggcgtctcgcccgaccaccagggcaagggtctgggcagcgccgtcgtgctccccggagtggaggcggccgagcgcgccggggtgcccgccttcctggagacctccgcgccccgcaacctccccttctacgagcggctcggcttcaccgtcaccgccgacgtcgaggtgcccgaaggaccgcgcacctggtgcatgacccgcaagcccggtgcctga

SEQ ID NO: 22279 - DNA, 2499 bp, Artificial Sequence; identical to SEQ ID NO: 22278
  Synthetic Polynucleotide

SEQ ID NO: 22280 - DNA, 2556 bp, Artificial Sequence
  Synthetic Polynucleotide
atggccttaccagtgaccgccttgctcctgccgctggccttgctgctccacgccgccaggccggacatccagatgacacagagccctagcagcctgtctgccagcgtgggagacagagtgaccatcacatgcaaggccagcgaccacatcaacaactggctggcctggtatcagcagaagcctggacaggcccctaagctgctgatctacggcgctaccacactggaaacaggcgtgcccagcagattttctggcagcggctctggcaccgactacaccctgacaatatccagcctccagcctgaggacttcgccacctactactgtcagcagagctggaacaccccttggacattcggccagggcaccaagctggaaatcaagagactcgagatccagaaccctgatcctgccgtgtaccagctgcgggatagcaagagcagcgacaagagcgtgtgtctgttcaccgacttcgacagccagaccaacgtgtcccagagcaaggactccgacgtgtacatcaccgataagtgcgtgctggacatgcggagcatggacttcaagagcaactccgccgtggcctggtccaacaagtccgatttcgcctgcgccaacgccttcaacaacagcattatccccgaggacacattcttcccaagcagcgacgtgccctgcgacgtgaagctggtggaaaagagcttcgagacagacaccaacctgaacttccagaacctgagcgtgatcggcttcagaatcctgctgctgaaagtggccggctttaacctgctgatgaccctgcggctgtggtccagccgcgccaagagaagcggatctggcgtgaagcagaccctgaatttcgacctgctgaagctggctggcgacgtggaatccaacccaggccctactagtatggactggatttggcgcatccttttccttgtcggcgctgctaccggcgcgcattccttcgaacaagttcagcttcaacagcctggcgctgagctggtcaaacctggcgcttctgtgaagatgagctgcaaagccagcggctacgccttcagcagctactggatcaactggatgaagcagaaacccggccagggactcgaatggatcggccaaatctatcccggcgacggcgacaccaactacaacggcaagttcaagggcagagccacactgaccgccgatacctctagcagcacagcctacatgcagctgagcagcctgaccagcgaagatagcgccgtgtacttctgtgcccggtccatcacaacagtcgtgggctgcgctatggactattggggccagggaacaagcgtgaccgtgtctagtacgcgtagccagcctcacaccaagcccagcgtgttcgtgatgaagaacggcaccaacgtggcctgcctcgtgaaagagttctaccccaaggacatcaggatcaacctggtgtccagcaagaagatcaccgagttcgaccccgccatcgtgatctcccccagcggcaagtacaacgccgtgaagctggggaagtacgaggacagcaacagcgtgacctgctccgtgcagcacgacaacaagaccgtgcacagcaccgactttcccatcaagaccgatgtgattacaatggaccccaaggacaactgctccaaggacgccaacgataccctgctgctccagctgaccaacaccagcgcctactacatgtacttgttgctgctgctgaagtccgtggtgtacttcgccatcatcacatgctgcctgctgcggagaaccgccttctgctgcaacggcgagaagtctagggccaagcgatctggatctggagcaacaaacttctcactactcaaacaagcaggtgacgtggaggagaatcccgggcctactagtatggactggatttggcgcatccttttccttgtcggcgctgctaccggcgcgcattccttcgctagaggccatatgaccgagtacaagcccacggtgcgcctcgccacccgcgacgacgtccccagggccgtacgcaccctcgccgccgcgttcgccgactaccccgccacgcgccacaccgtcgatccggaccgccacatcgagcgggtcaccgagctgcaagaactcttcctcacgcgcgtcgggctcgacatcggcaaggtgtgggtcgcggacgacggcgccgcggtggcggtctggaccacgccggagagcgtcgaagcgggggcggtgttcgccgagatcggcccgcgcatggccgagttgagcggttcccggctggccgcgcagcaacagatggaaggcctcctggcgccgcaccggcccaaggagcccgcgtggttcctggccaccgtcggcgtctcgcccgaccaccagggcaagggtctgggcagcgccgtcgtgctccccggagtggaggcggccgagcgcgccggggtgcccgccttcctggagacctccgcgccccgcaacctccccttctacgagcggctcggcttcaccgtcaccgccgacgtcgaggtgcccgaaggaccgcgcacctggtgcatgacccgcaagcccggtgcctga

SEQ ID NO: 22281 - DNA, 2568 bp, Artificial Sequence
  Synthetic Polynucleotide
atggccttaccagtgaccgccttgctcctgccgctggccttgctgctccacgccgccaggccggacatccagatgacacagagccctagcagcctgtctgccagcgtgggagacagagtgaccatcacatgcaaggccagcgaccacatcaacaactggctggcctggtatcagcagaagcctggacaggcccctaagctgctgatctacggcgctaccacactggaaacaggcgtgcccagcagattttctggcagcggctctggcaccgactacaccctgacaatatccagcctccagcctgaggacttcgccacctactactgtcagcagagctggaacaccccttggacattcggccagggcaccaagctggaaatcaagagactcgaggacctgaagaacgtgttcccacctgaggtggccgtgttcgagcctagcgaggccgagatcagccacacccagaaagccaccctcgtgtgcctggctaccggcttctaccccgaccatgtggaactgtcttggtgggtcaacggcaaagaggtgcacagcggcgtgtgtaccgacccccagccactgaaagaacagcccgccctgaacgacagccggtactgcctgagcagcagactgagagtgtccgccaccttctggcagaacccccggaaccacttcagatgccaggtgcagttctacggcctgagcgagaacgacgagtggacccaggacagagccaagcccgtgacccagatcgtgtctgccgaagcctggatccccgaggacacattcttcccaagccccgagagcagctgcgacgtgaagctggtggaaaagagcttcgagacagacaccaacctgaacttccagaacctgagcgtgatcggcttcagaatcctgctgctgaaagtggccggctttaacctgctgatgaccctgcggctgtggtccagccgcgccaagagaagcggatctggcgtgaagcagaccctgaatttcgacctgctgaagctggctggcgacgtggaatccaacccaggcccttctagtatggactggatttggcgcatccttttccttgtcggcgctgctaccggcgcgcattccttcgaacaagttcagcttcaacagcctggcgctgagctggtcaaacctggcgcttctgtgaagatgagctgcaaagccagcggctacgccttcagcagctactggatcaactggatgaagcagaaacccggccagggactcgaatggatcggccaaatctatcccggcgacggcgacaccaactacaacggcaagttcaagggcagagccacactgaccgccgatacctctagcagcacagcctacatgcagctgagcagcctgaccagcgaagatagcgccgtgtacttctgtgcccggtccatcacaacagtcgtgggctgcgctatggactattggggccagggaacaagcgtgaccgtgtctagtacgcgtatccagaaccctgatcctgccgtgtaccagctgcgggatagcaagagcagcgacaagagcgtgtgtctgttcaccgacttcgacagccagaccaacgtgtcccagagcaaggactccgacgtgtacatcaccgataagtgcgtgctggacatgcggagcatggacttcaagagcaactccgccgtggcctggtccaacaagtccgatttcgcctgcgccaacgccttcaacaacagcattggcagagccgattgcggctttaccagcgagagctaccagcagggcgtgctgagcgccaccatcctgtacgagatcctgctgggcaaggccaccctgtacgccgtgctggtgtctgccctggtgctgatggctatggtcaagcggaaggacagccggggaagggccaagcgatctggatctggagcaacaaacttctcactactcaaacaagcaggtgacgtggaggagaatcccgggcctactagaggccatatgaccgagtacaagcccacggtgcgcctcgccacccgcgacgacgtccccagggccgtacgcaccctcgccgccgcgttcgccgactaccccgccacgcgccacaccgtcgatccggaccgccacatcgagcgggtcaccgagctgcaagaactcttcctcacgcgcgtcgggctcgacatcggcaaggtgtgggtcgcggacgacggcgccgcggtggcggtctggaccacgccggagagcgtcgaagcgggggcggtgttcgccgagatcggcccgcgcatggccgagttgagcggttcccggctggccgcgcagcaacagatggaaggcctcctggcgccgcaccggcccaaggagcccgcgtggttcctggccaccgtcggcgtctcgcccgaccaccagggcaagggtctgggcagcgccgtcgtgctccccggagtggaggcggccgagcgcgccggggtgcccgccttcctggagacctccgcgccccgcaacctccccttctacgagcggctcggcttcaccgtcaccgccgacgtcgaggtgcccgaaggaccgcgcacctggtgcatgacccgcaagcccggtgcctga

SEQ ID NO: 22282 - DNA, 2643 bp, Artificial Sequence
  Synthetic Polynucleotide
atggccttaccagtgaccgccttgctcctgccgctggccttgctgctccacgccgccaggccggacatccagatgacacagagccctagcagcctgtctgccagcgtgggagacagagtgaccatcacatgcaaggccagcgaccacatcaacaactggctggcctggtatcagcagaagcctggacaggcccctaagctgctgatctacggcgctaccacactggaaacaggcgtgcccagcagattttctggcagcggctctggcaccgactacaccctgacaatatccagcctccagcctgaggacttcgccacctactactgtcagcagagctggaacaccccttggacattcggccagggcaccaagctggaaatcaagagactcgaggggaaaccaattcccaaccctcttctgggactggattcaaccggcagcggcgacaagcagctggacgccgacgtgtcccccaagcctaccatcttcctgccctctatcgccgagacaaagctccagaaggccggcacctacctgtgcctgctggaaaagttcttcccagatgtgattaagatccactggcaggaaaagaagtccaacaccatcctgggcagccaggaaggcaacaccatgaagaccaacgacacctacatgaagttcagctggctgaccgtgcccgagaagtccctggacaaagaacacagatgcatcgtgcggcacgaaaacaacaagaacggcgtggaccaggaaatcatcttcccagaagtgaaaaccgactccaccgaccacgtgaagcccaaagagacagagaacaccaagcagcccagcaagagctgccacaagcccaaggccatcgtgcacaccgagaaagtgaacatgatgagcctgaccgtgctgggcctgcggatgctgttcgccaaaaccgtggccgtgaacttcctgctgaccgccaagctgttcttcctccgcgccaagagaagcggatctggcgtgaagcagaccctgaatttcgacctgctgaagctggctggcgacgtggaatccaacccaggcccttctagtatggactggatttggcgcatccttttccttgtcggcgctgctaccggcgcgcattccttcgaacaagttcagcttcaacagcctggcgctgagctggtcaaacctggcgcttctgtgaagatgagctgcaaagccagcggctacgccttcagcagctactggatcaactggatgaagcagaaacccggccagggactcgaatggatcggccaaatctatcccggcgacggcgacaccaactacaacggcaagttcaagggcagagccacactgaccgccgatacctctagcagcacagcctacatgcagctgagcagcctgaccagcgaagatagcgccgtgtacttctgtgcccggtccatcacaacagtcgtgggctgcgctatggactattggggccagggaacaagcgtgaccgtgtctagtacgcgtagccagcctcacaccaagcccagcgtgttcgtgatgaagaacggcaccaacgtggcctgcctcgtgaaagagttctaccccaaggacatcaggatcaacctggtgtccagcaagaagatcaccgagttcgaccccgccatcgtgatctcccccagcggcaagtacaacgccgtgaagctggggaagtacgaggacagcaacagcgtgacctgctccgtgcagcacgacaacaagaccgtgcacagcaccgactttcccatcaagaccgatgtgattacaatggaccccaaggacaactgctccaaggacgccaacgataccctgctgctccagctgaccaacaccagcgcctactacatgtacttgttgctgctgctgaagtccgtggtgtacttcgccatcatcacatgctgcctgctgcggagaaccgccttctgctgcaacggcgagaagtctagggccaagcgatctggatctggagcaacaaacttctcactactcaaacaagcaggtgacgtggaggagaatcccgggcctactagaggccatatgaccgagtacaagcccacggtgcgcctcgccacccgcgacgacgtccccagggccgtacgcaccctcgccgccgcgttcgccgactaccccgccacgcgccacaccgtcgatccggaccgccacatcgagcgggtcaccgagctgcaagaactcttcctcacgcgcgtcgggctcgacatcggcaaggtgtgggtcgcggacgacggcgccgcggtggcggtctggaccacgccggagagcgtcgaagcgggggcggtgttcgccgagatcggcccgcgcatggccgagttgagcggttcccggctggccgcgcagcaacagatggaaggcctcctggcgccgcaccggcccaaggagcccgcgtggttcctggccaccgtcggcgtctcgcccgaccaccagggcaagggtctgggcagcgccgtcgtgctccccggagtggaggcggccgagcgcgccggggtgcccgccttcctggagacctccgcgccccgcaacctccccttctacgagcggctcggcttcaccgtcaccgccgacgtcgaggtgcccgaaggaccgcgcacctggtgcatgacccgcaagcccggtgcctga

SEQ ID NO: 22283 - DNA, 2592 bp, Artificial Sequence
  Synthetic Polynucleotide
atggccttaccagtgaccgccttgctcctgccgctggccttgctgctccacgccgccaggccggacatccagatgacacagagccctagcagcctgtctgccagcgtgggagacagagtgaccatcacatgcaaggccagcgaccacatcaacaactggctggcctggtatcagcagaagcctggacaggcccctaagctgctgatctacggcgctaccacactggaaacaggcgtgcccagcagattttctggcagcggctctggcaccgactacaccctgacaatatccagcctccagcctgaggacttcgccacctactactgtcagcagagctggaacaccccttggacattcggccagggcaccaagctggaaatcaagagactcgaggacaagcagctggacgccgacgtgtcccccaagcctaccatcttcctgccctctatcgccgagacaaagctccagaaggccggcacctacctgtgcctgctggaaaagttcttcccagatgtgattaagatccactggcaggaaaagaagtccaacaccatcctgggcagccaggaaggcaacaccatgaagaccaacgacacctacatgaagttcagctggctgaccgtgcccgagaagtccctggacaaagaacacagatgcatcgtgcggcacgaaaacaacaagaacggcgtggaccaggaaatcatcttcccagaagtgaaaaccgactccaccgaccacgtgaagcccaaagagacagagaacaccaagcagcccagcaagagctgccacaagcccaaggccatcgtgcacaccgagaaagtgaacatgatgagcctgaccgtgctgggcctgcggatgctgttcgccaaaaccgtggccgtgaacttcctgctgaccgccaagctgttcttcctccgcgccaagagaagcggatctggcgtgaagcagaccctgaatttcgacctgctgaagctggctggcgacgtggaatccaacccaggccctactagtatggactggatttggcgcatccttttccttgtcggcgctgctaccggcgcgcattccttcgaacaagttcagcttcaacagcctggcgctgagctggtcaaacctggcgcttctgtgaagatgagctgcaaagccagcggctacgccttcagcagctactggatcaactggatgaagcagaaacccggccagggactcgaatggatcggccaaatctatcccggcgacggcgacaccaactacaacggcaagttcaagggcagagccacactgaccgccgatacctctagcagcacagcctacatgcagctgagcagcctgaccagcgaagatagcgccgtgtacttctgtgcccggtccatcacaacagtcgtgggctgcgctatggactattggggccagggaacaagcgtgaccgtgtctagtacgcgtagccagcctcacaccaagcccagcgtgttcgtgatgaagaacggcaccaacgtggcctgcctcgtgaaagagttctaccccaaggacatcaggatcaacctggtgtccagcaagaagatcaccgagttcgaccccgccatcgtgatctcccccagcggcaagtacaacgccgtgaagctggggaagtacgaggacagcaacagcgtgacctgctccgtgcagcacgacaacaagaccgtgcacagcaccgactttcccatcaagaccgatgtgattacaatggaccccaaggacaactgctccaaggacgccaacgataccctgctgctccagctgaccaacaccagcgcctactacatgtacttgttgctgctgctgaagtccgtggtgtacttcgccatcatcacatgctgcctgctgcggagaaccgccttctgctgcaacggcgagaagtctagggccaagcgatctggatctggagcaacaaacttctcactactcaaacaagcaggtgacgtggaggagaatcccgggccttctagaggccatatgaccgagtacaagcccacggtgcgcctcgccacccgcgacgacgtccccagggccgtacgcaccctcgccgccgcgttcgccgactaccccgccacgcgccacaccgtcgatccggaccgccacatcgagcgggtcaccgagctgcaagaactcttcctcacgcgcgtcgggctcgacatcggcaaggtgtgggtcgcggacgacggcgccgcggtggcggtctggaccacgccggagagcgtcgaagcgggggcggtgttcgccgagatcggcccgcgcatggccgagttgagcggttcccggctggccgcgcagcaacagatggaaggcctcctggcgccgcaccggcccaaggagcccgcgtggttcctggccaccgtcggcgtctcgcccgaccaccagggcaagggtctgggcagcgccgtcgtgctccccggagtggaggcggccgagcgcgccggggtgcccgccttcctggagacctccgcgccccgcaacctccccttctacgagcggctcggcttcaccgtcaccgccgacgtcgaggtgcccgaaggaccgcgcacctggtgcatgacccgcaagcccggtgcctga

SEQ ID NO: 22284 - DNA, 2577 bp, Artificial Sequence
  Synthetic Polynucleotide
atggccttaccagtgaccgccttgctcctgccgctggccttgctgctccacgccgccaggccggacatccagatgacacagagccctagcagcctgtctgccagcgtgggagacagagtgaccatcacatgcaaggccagcgaccacatcaacaactggctggcctggtatcagcagaagcctggacaggcccctaagctgctgatctacggcgctaccacactggaaacaggcgtgcccagcagattttctggcagcggctctggcaccgactacaccctgacaatatccagcctccagcctgaggacttcgccacctactactgtcagcagagctggaacaccccttggacattcggccagggcaccaagctggaaatcaagagactcgaggccgacgtgtcccccaagcctaccatcttcctgccctctatcgccgagacaaagctccagaaggccggcacctacctgtgcctgctggaaaagttcttcccagatgtgattaagatccactggcaggaaaagaagtccaacaccatcctgggcagccaggaaggcaacaccatgaagaccaacgacacctacatgaagttcagctggctgaccgtgcccgagaagtccctggacaaagaacacagatgcatcgtgcggcacgaaaacaacaagaacggcgtggaccaggaaatcatcttcccagaagtgaaaaccgactccaccgaccacgtgaagcccaaagagacagagaacaccaagcagcccagcaagagctgccacaagcccaaggccatcgtgcacaccgagaaagtgaacatgatgagcctgaccgtgctgggcctgcggatgctgttcgccaaaaccgtggccgtgaacttcctgctgaccgccaagctgttcttcctccgcgccaagagaagcggatctggcgtgaagcagaccctgaatttcgacctgctgaagctggctggcgacgtggaatccaacccaggccctactagtatggactggatttggcgcatccttttccttgtcggcgctgctaccggcgcgcattccttcgaacaagttcagcttcaacagcctggcgctgagctggtcaaacctggcgcttctgtgaagatgagctgcaaagccagcggctacgccttcagcagctactggatcaactggatgaagcagaaacccggccagggactcgaatggatcggccaaatctatcccggcgacggcgacaccaactacaacggcaagttcaagggcagagccacactgaccgccgatacctctagcagcacagcctacatgcagctgagcagcctgaccagcgaagatagcgccgtgtacttctgtgcccggtccatcacaacagtcgtgggctgcgctatggactattggggccagggaacaagcgtgaccgtgtctagtacgcgtagccagcctcacaccaagcccagcgtgttcgtgatgaagaacggcaccaacgtggcctgcctcgtgaaagagttctaccccaaggacatcaggatcaacctggtgtccagcaagaagatcaccgagttcgaccccgccatcgtgatctcccccagcggcaagtacaacgccgtgaagctggggaagtacgaggacagcaacagcgtgacctgctccgtgcagcacgacaacaagaccgtgcacagcaccgactttcccatcaagaccgatgtgattacaatggaccccaaggacaactgctccaaggacgccaacgataccctgctgctccagctgaccaacaccagcgcctactacatgtacttgttgctgctgctgaagtccgtggtgtacttcgccatcatcacatgctgcctgctgcggagaaccgccttctgctgcaacggcgagaagtctagggccaagcgatctggatctggagcaacaaacttctcactactcaaacaagcaggtgacgtggaggagaatcccgggccttctagaggccatatgaccgagtacaagcccacggtgcgcctcgccacccgcgacgacgtccccagggccgtacgcaccctcgccgccgcgttcgccgactaccccgccacgcgccacaccgtcgatccggaccgccacatcgagcgggtcaccgagctgcaagaactcttcctcacgcgcgtcgggctcgacatcggcaaggtgtgggtcgcggacgacggcgccgcggtggcggtctggaccacgccggagagcgtcgaagcgggggcggtgttcgccgagatcggcccgcgcatggccgagttgagcggttcccggctggccgcgcagcaacagatggaaggcctcctggcgccgcaccggcccaaggagcccgcgtggttcctggccaccgtcggcgtctcgcccgaccaccagggcaagggtctgggcagcgccgtcgtgctccccggagtggaggcggccgagcgcgccggggtgcccgccttcctggagacctccgcgccccgcaacctccccttctacgagcggctcggcttcaccgtcaccgccgacgtcgaggtgcccgaaggaccgcgcacctggtgcatgacccgcaagcccggtgcctga

SEQ ID NO: 22285 - DNA, 27 bp, Artificial Sequence
  Synthetic Polynucleotide
ggggggggggggggggggggggggggg

SEQ ID NO: 22286 - DNA, 3150 bp, Artificial Sequence
  Synthetic Polynucleotide
atggccttaccagtgaccgccttgctcctgccgctggccttgctgctccacgccgccaggccggcatgcctgttcaatcaagaggtgcagatccctctgaccgagagctactgtggcccctgtcctaagaactggatctgctacaagaacaactgctaccagttcttcgacgagagcaagaattggtacgagagccaggccagctgcatgagccagaatgccagcctgctgaaggtgtacagcaaagaggaccaggacctgctgaaactggtcaagagcgcccactggatgggccttgtgcacatccccaccaatggctcttggcagtgggaggacggcagcattctgagccctaacctgctgaccatcatcgagatgcagaagggcgactgcgccctgtacgccagcagctttaagggctacatcgagaattgcagcaccccgaacacctacatctgtatgcagagaaccgttctcgagggacagcctaaggccaatcctaccgtgacactgttccctccaagcagcgaagaactccaggccaacaaggccacacttgtgtgcctgatctccgacttctaccctggggctgtgacagtggcttggaaggccgatggatctcctgtgaaagccggcgtggaaaccaccaagccatccaagcagagcaacaacaaatacgccgccagctcctacctgagcctgacacctgagcagtggaagtcccacagatcctacagctgccaagtgacccacgaaggcagcaccgtggaaaagacagtggcccctacagagtgcagccccatcaagaccgatgtgattacaatggaccccaaggacaactgctccaaggacgccaacgataccctgctgctccagctgaccaacaccagcgcctactacatgtacttgttgctgctgctgaagtccgtggtgtacttcgccatcatcacatgctgcctgctgcggagaaccgccttctgctgcaacggcgagaagtctagggccaagcgatctggatctggagcaacaaacttctcactactcaaacaagcaggtgacgtggaggagaatcccgggcctactagtgccaccatggactggatttggcgcatccttttccttgtcggcgctgctaccggcgcccattccgggccccaggttcagctgcaagagtctggcggaggacttgctcaagctggcggaagcctgagactgtcttgtgccgcctctggcagaaccttcagcatgggctggtttagacaggcccctggcaaagagagagagttcgtcgccgccatcacatacagcggcggcagcccttactacgcctcttctgtcagaggccggttcaccatcagccgggacaacgccaagaacaccgtgtacctccagatgaacagcctgaagccagaggacaccgccgtgtactactgtgccgccaatccaacctacggcagcgactggaatgccgagaattggggccagggcacccaagtgacagtgtctagtggatccggcggcggaggatctggcggaggcggatctgggggcggaggctctttcgaacaagttcagcttcaacagcctggcgctgagctggtcaaacctggcgcttctgtgaagatgagctgcaaagccagcggctacgccttcagcagctactggatcaactggatgaagcagaaacccggccagggactcgaatggatcggccaaatctatcccggcgacggcgacaccaactacaacggcaagttcaagggcagagccacactgaccgccgatacctctagcagcacagcctacatgcagctgagcagcctgaccagcgaagatagcgccgtgtacttctgtgcccggtccatcacaacagtcgtgggctgcgctatggactattggggccagggaacaagcgtgaccgtgtctagtacgcgtgcctctacaaagggaccctccgtgtttcctctggctcccagcagcaagtctacaagcggaggaacagccgctctgggctgcctggtcaaggattactttcccgagcctgtgaccgtgtcctggaatagcggagcactgacaagcggcgtgcacacctttccagccgtgctgcaaagcagcggcctgtactctctgagcagcgtggtcacagtgcctagctctagcctgggcacccagacctacatctgcaatgtgaaccacaagcctagcaacaccaaggtggacaagagagtggaacccaagagctgtgaagtgaaaaccgactccaccgaccacgtgaagcccaaagagacagagaacaccaagcagcccagcaagagctgccacaagcccaaggccatcgtgcacaccgagaaagtgaacatgatgagcctgaccgtgctgggcctgcggatgctgttcgccaaaaccgtggccgtgaacttcctgctgaccgccaagctgttcttcctccgcgccaagagaagcggatctggcgtgaagcagaccctgaatttcgacctgctgaagctggctggcgacgtggaatccaacccaggcccttctagaggccatatgaccgagtacaagcccacggtgcgcctcgccacccgcgacgacgtccccagggccgtacgcaccctcgccgccgcgttcgccgactaccccgccacgcgccacaccgtcgatccggaccgccacatcgagcgggtcaccgagctgcaagaactcttcctcacgcgcgtcgggctcgacatcggcaaggtgtgggtcgcggacgacggcgccgcggtggcggtctggaccacgccggagagcgtcgaagcgggggcggtgttcgccgagatcggcccgcgcatggccgagttgagcggttcccggctggccgcgcagcaacagatggaaggcctcctggcgccgcaccggcccaaggagcccgcgtggttcctggccaccgtcggcgtctcgcccgaccaccagggcaagggtctgggcagcgccgtcgtgctccccggagtggaggcggccgagcgcgccggggtgcccgccttcctggagacctccgcgccccgcaacctccccttctacgagcggctcggcttcaccgtcaccgccgacgtcgaggtgcccgaaggaccgcgcacctggtgcatgacccgcaagcccggtgcctga

SEQ ID NO: 22287 - DNA, 3912 bp, Artificial Sequence
  Synthetic Polynucleotide
atggccttaccagtgaccgccttgctcctgccgctggccttgctgctccacgccgccaggccggcatgcgaagtgcagctgcttgaaagtggcggcggactgattcagcctggcggatctctgagactgagctgtgccgccagcggcttcaccttttctagccacgccatgacctgggtccgacaggcacctggaaaagggcttgaatgggtgtccgccatcagcggctctggcgattacacacactacgccgacagcgtgaagggcagattcaccatcagcagagacaacagcaagaacaccgtgtacctccagatgaacagcctgagagccgaggacagcgccgtgtattattgcgccaaggatgaggatggcggcagcctgcttggacacagaggacaaggcaccctggtcaccgtttcttccggtaccggcggaggcggatctggcggcggaggtagcggtggcggaggatctgaattcgacatccagatgacacagagccctagcagcctgtctgccagcgtgggagacagagtgaccatcacatgcaaggccagcgaccacatcaacaactggctggcctggtatcagcagaagcctggacaggcccctaagctgctgatctacggcgctaccacactggaaacaggcgtgcccagcagattttctggcagcggctctggcaccgactacaccctgacaatatccagcctccagcctgaggacttcgccacctactactgtcagcagagctggaacaccccttggacattcggccagggcaccaagctggaaatcaagagactcgagggacagcctaaggccaatcctaccgtgacactgttccctccaagcagcgaagaactccaggccaacaaggccacacttgtgtgcctgatctccgacttctaccctggggctgtgacagtggcttggaaggccgatggatctcctgtgaaagccggcgtggaaaccaccaagccatccaagcagagcaacaacaaatacgccgccagctcctacctgagcctgacacctgagcagtggaagtcccacagatcctacagctgccaagtgacccacgaaggcagcaccgtggaaaagacagtggcccctacagagtgcagcggcagagccgattgcggctttaccagcgagagctaccagcagggcgtgctgagcgccaccatcctgtacgagatcctgctgggcaaggccaccctgtacgccgtgctggtgtctgccctggtgctgatggctatggtcaagcggaaggacagccggggaagggccaagcgatctggatctggagcaacaaacttctcactactcaaacaagcaggtgacgtggaggagaatcccgggcctactagtaccatggactggatttggcgcatccttttccttgtcggcgctgctaccggcgcccattccctgttcaatcaagaggtgcagatccctctgaccgagagctactgtggcccctgtcctaagaactggatctgctacaagaacaactgctaccagttcttcgacgagagcaagaattggtacgagagccaggccagctgcatgagccagaatgccagcctgctgaaggtgtacagcaaagaggaccaggacctgctgaaactggtcaagagcgcccactggatgggccttgtgcacatccccaccaatggctcttggcagtgggaggacggcagcattctgagccctaacctgctgaccatcatcgagatgcagaagggcgactgcgccctgtacgccagcagctttaagggctacatcgagaattgcagcaccccgaacacctacatctgtatgcagagaaccgtttctggcggaggcggctctggaggaggcggaagtggcggcggaggcgacctctttaatcaagaagtccagattccactcaccgaatcctactgcggaccttgtccaaaaaattggatttgttataagaacaactgttatcaattctttgatgagtctaaaaattggtatgagtcccaggcttcctgcatgtctcagaacgcttctctgctgaaagtctactctaaagaagatcaggatctcctgaagctcgtcaagtctgcccattggatggggctcgtccacattcctaccaacggaagctggcaatgggaagatggctccatcctgtctccaaatctgctcacgattattgaaatgcagaaaggggattgtgctctctacgccagctccttcaagggatatattgagaactgtagcacgcccaatacttatatctgtatgcaacggaccgtgggatccggcggcggaggatctggcggaggcggatctgggggcggaggctctttcgaacaagttcagcttcaacagcctggcgctgagctggtcaaacctggcgcttctgtgaagatgagctgcaaagccagcggctacgccttcagcagctactggatcaactggatgaagcagaaacccggccagggactcgaatggatcggccaaatctatcccggcgacggcgacaccaactacaacggcaagttcaagggcagagccacactgaccgccgatacctctagcagcacagcctacatgcagctgagcagcctgaccagcgaagatagcgccgtgtacttctgtgcccggtccatcacaacagtcgtgggctgcgctatggactattggggccagggaacaagcgtgaccgtgtctagtacgcgtgcctctacaaagggaccctccgtgtttcctctggctcccagcagcaagtctacaagcggaggaacagccgctctgggctgcctggtcaaggattactttcccgagcctgtgaccgtgtcctggaatagcggagcactgacaagcggcgtgcacacctttccagccgtgctgcaaagcagcggcctgtactctctgagcagcgtggtcacagtgcctagctctagcctgggcacccagacctacatctgcaatgtgaaccacaagcctagcaacaccaaggtggacaagagagtggaacccaagagctgtatccccgaggacacattcttcccaagccccgagagcagctgcgacgtgaagctggtggaaaagagcttcgagacagacaccaacctgaacttccagaacctgagcgtgatcggcttcagaatcctgctgctgaaagtggccggctttaacctgctgatgaccctgcggctgtggtccagccgcgccaagagaagcggatctggcgtgaagcagaccctgaatttcgacctgctgaagctggctggcgacgtggaatccaacccaggcccttctagaggccatatgaccgagtacaagcccacggtgcgcctcgccacccgcgacgacgtccccagggccgtacgcaccctcgccgccgcgttcgccgactaccccgccacgcgccacaccgtcgatccggaccgccacatcgagcgggtcaccgagctgcaagaactcttcctcacgcgcgtcgggctcgacatcggcaaggtgtgggtcgcggacgacggcgccgcggtggcggtctggaccacgccggagagcgtcgaagcgggggcggtgttcgccgagatcggcccgcgcatggccgagttgagcggttcccggctggccgcgcagcaacagatggaaggcctcctggcgccgcaccggcccaaggagcccgcgtggttcctggccaccgtcggcgtctcgcccgaccaccagggcaagggtctgggcagcgccgtcgtgctccccggagtggaggcggccgagcgcgccggggtgcccgccttcctggagacctccgcgccccgcaacctccccttctacgagcggctcggcttcaccgtcaccgccgacgtcgaggtgcccgaaggaccgcgcacctggtgcatgacccgcaagcccggtgcctga

SEQ ID NO: 22288 - DNA, 3195 bp, Artificial Sequence
  Synthetic Polynucleotide
atggccttaccagtgaccgccttgctcctgccgctggccttgctgctccacgccgccaggccggcatgcctgttcaatcaagaggtgcagatccctctgaccgagagctactgtggcccctgtcctaagaactggatctgctacaagaacaactgctaccagttcttcgacgagagcaagaattggtacgagagccaggccagctgcatgagccagaatgccagcctgctgaaggtgtacagcaaagaggaccaggacctgctgaaactggtcaagagcgcccactggatgggccttgtgcacatccccaccaatggctcttggcagtgggaggacggcagcattctgagccctaacctgctgaccatcatcgagatgcagaagggcgactgcgccctgtacgccagcagctttaagggctacatcgagaattgcagcaccccgaacacctacatctgtatgcagagaaccgttctcgagggacagcctaaggccaatcctaccgtgacactgttccctccaagcagcgaagaactccaggccaacaaggccacacttgtgtgcctgatctccgacttctaccctggggctgtgacagtggcttggaaggccgatggatctcctgtgaaagccggcgtggaaaccaccaagccatccaagcagagcaacaacaaatacgccgccagctcctacctgagcctgacacctgagcagtggaagtcccacagatcctacagctgccaagtgacccacgaaggcagcaccgtggaaaagacagtggcccctacagagtgcagccccatcaagaccgatgtgattacaatggaccccaaggacaactgctccaaggacgccaacgataccctgctgctccagctgaccaacaccagcgcctactacatgtacttgttgctgctgctgaagtccgtggtgtacttcgccatcatcacatgctgcctgctgcggagaaccgccttctgctgcaacggcgagaagtctagggccaagcgatctggatctggagcaacaaacttctcactactcaaacaagcaggtgacgtggaggagaatcccgggcctactagtgccaccatggactggatttggcgcatccttttccttgtcggcgctgctaccggcgcccattccgggccccaggttcagctgcaagagtctggcggaggacttgctcaagctggcggaagcctgagactgtcttgtgccgcctctggcagaaccttcagcatgggctggtttagacaggcccctggcaaagagagagagttcgtcgccgccatcacatacagcggcggcagcccttactacgcctcttctgtcagaggccggttcaccatcagccgggacaacgccaagaacaccgtgtacctccagatgaacagcctgaagccagaggacaccgccgtgtactactgtgccgccaatccaacctacggcagcgactggaatgccgagaattggggccagggcacccaagtgacagtgtctagtggatccggcggcggaggatctggcggaggcggatctgggggcggaggctctttcgaagacctctttaatcaagaagtccagattccactcaccgaatcctactgcggaccttgtccaaaaaattggatttgttataagaacaactgttatcaattctttgatgagtctaaaaattggtatgagtcccaggcttcctgcatgtctcagaacgcttctctgctgaaagtctactctaaagaagatcaggatctcctgaagctcgtcaagtctgcccattggatggggctcgtccacattcctaccaacggaagctggcaatgggaagatggctccatcctgtctccaaatctgctcacgattattgaaatgcagaaaggggattgtgctctctacgccagctccttcaagggatttattgagaactgtagcacgcccaatacttatatctgtatgcaacggaccgtgacgcgtgcctctacaaagggaccctccgtgtttcctctggctcccagcagcaagtctacaagcggaggaacagccgctctgggctgcctggtcaaggattactttcccgagcctgtgaccgtgtcctggaatagcggagcactgacaagcggcgtgcacacctttccagccgtgctgcaaagcagcggcctgtactctctgagcagcgtggtcacagtgcctagctctagcctgggcacccagacctacatctgcaatgtgaaccacaagcctagcaacaccaaggtggacaagagagtggaacccaagagctgtgaagtgaaaaccgactccaccgaccacgtgaagcccaaagagacagagaacaccaagcagcccagcaagagctgccacaagcccaaggccatcgtgcacaccgagaaagtgaacatgatgagcctgaccgtgctgggcctgcggatgctgttcgccaaaaccgtggccgtgaacttcctgctgaccgccaagctgttcttcctccgcgccaagagaagcggatctggcgtgaagcagaccctgaatttcgacctgctgaagctggctggcgacgtggaatccaacccaggcccttctagaggccatatgaccgagtacaagcccacggtgcgcctcgccacccgcgacgacgtccccagggccgtacgcaccctcgccgccgcgttcgccgactaccccgccacgcgccacaccgtcgatccggaccgccacatcgagcgggtcaccgagctgcaagaactcttcctcacgcgcgtcgggctcgacatcggcaaggtgtgggtcgcggacgacggcgccgcggtggcggtctggaccacgccggagagcgtcgaagcgggggcggtgttcgccgagatcggcccgcgcatggccgagttgagcggttcccggctggccgcgcagcaacagatggaaggcctcctggcgccgcaccggcccaaggagcccgcgtggttcctggccaccgtcggcgtctcgcccgaccaccagggcaagggtctgggcagcgccgtcgtgctccccggagtggaggcggccgagcgcgccggggtgcccgccttcctggagacctccgcgccccgcaacctccccttctacgagcggctcggcttcaccgtcaccgccgacgtcgaggtgcccgaaggaccgcgcacctggtgcatgacccgcaagcccggtgcctga

SEQ ID NO: 22289 - DNA, 2700 bp, Artificial Sequence
  Synthetic Polynucleotide
atggccttaccagtgaccgccttgctcctgccgctggccttgctgctccacgccgccaggccggcatgcctgttcaatcaagaggtgcagatccctctgaccgagagctactgtggcccctgtcctaagaactggatctgctacaagaacaactgctaccagttcttcgacgagagcaagaattggtacgagagccaggccagctgcatgagccagaatgccagcctgctgaaggtgtacagcaaagaggaccaggacctgctgaaactggtcaagagcgcccactggatgggccttgtgcacatccccaccaatggctcttggcagtgggaggacggcagcattctgagccctaacctgctgaccatcatcgagatgcagaagggcgactgcgccctgtacgccagcagctttaagggctacatcgagaattgcagcaccccgaacacctacatctgtatgcagagaaccgttctcgaggacctgaagaacgtgttcccacctgaggtggccgtgttcgagcctagcgaggccgagatcagccacacccagaaagccaccctcgtgtgcctggctaccggcttctaccccgaccatgtggaactgtcttggtgggtcaacggcaaagaggtgcacagcggcgtgtgtaccgacccccagccactgaaagaacagcccgccctgaacgacagccggtactgcctgagcagcagactgagagtgtccgccaccttctggcagaacccccggaaccacttcagatgccaggtgcagttctacggcctgagcgagaacgacgagtggacccaggacagagccaagcccgtgacccagatcgtgtctgccgaagcctggggcagagccgattgcggctttaccagcgagagctaccagcagggcgtgctgagcgccaccatcctgtacgagatcctgctgggcaaggccaccctgtacgccgtgctggtgtctgccctggtgctgatggctatggtcaagcggaaggacagccggggaagggccaagcgatctggatctggagcaacaaacttctcactactcaaacaagcaggtgacgtggaggagaatcccgggcctactagtatggactggatttggcgcatccttttccttgtcggcgctgctaccggcgcgcattccttcgaagacctctttaatcaagaagtccagattccactcaccgaatcctactgcggaccttgtccaaaaaattggatttgttataagaacaactgttatcaattctttgatgagtctaaaaattggtatgagtcccaggcttcctgcatgtctcagaacgcttctctgctgaaagtctactctaaagaagatcaggatctcctgaagctcgtcaagtctgcccattggatggggctcgtccacattcctaccaacggaagctggcaatgggaagatggctccatcctgtctccaaatctgctcacgattattgaaatgcagaaaggggattgtgctctctacgccagctccttcaagggatttattgagaactgtagcacgcccaatacttatatctgtatgcaacggaccgtgacgcgtatccagaaccctgatcctgccgtgtaccagctgcgggatagcaagagcagcgacaagagcgtgtgtctgttcaccgacttcgacagccagaccaacgtgtcccagagcaaggactccgacgtgtacatcaccgataagtgcgtgctggacatgcggagcatggacttcaagagcaactccgccgtggcctggtccaacaagtccgatttcgcctgcgccaacgccttcaacaacagcattatccccgaggacacattcttcccaagccccgagagcagctgcgacgtgaagctggtggaaaagagcttcgagacagacaccaacctgaacttccagaacctgagcgtgatcggcttcagaatcctgctgctgaaagtggccggctttaacctgctgatgaccctgcggctgtggtccagccgcgccaagagaagcggatctggcgtgaagcagaccctgaatttcgacctgctgaagctggctggcgacgtggaatccaacccaggcccttctagaggccatatgaccgagtacaagcccacggtgcgcctcgccacccgcgacgacgtccccagggccgtacgcaccctcgccgccgcgttcgccgactaccccgccacgcgccacaccgtcgatccggaccgccacatcgagcgggtcaccgagctgcaagaactcttcctcacgcgcgtcgggctcgacatcggcaaggtgtgggtcgcggacgacggcgccgcggtggcggtctggaccacgccggagagcgtcgaagcgggggcggtgttcgccgagatcggcccgcgcatggccgagttgagcggttcccggctggccgcgcagcaacagatggaaggcctcctggcgccgcaccggcccaaggagcccgcgtggttcctggccaccgtcggcgtctcgcccgaccaccagggcaagggtctgggcagcgccgtcgtgctccccggagtggaggcggccgagcgcgccggggtgcccgccttcctggagacctccgcgccccgcaacctccccttctacgagcggctcggcttcaccgtcaccgccgacgtcgaggtgcccgaaggaccgcgcacctggtgcatgacccgcaagcccggtgcctga

SEQ ID NO: 22290 - DNA, 3528 bp, Artificial Sequence
  Synthetic Polynucleotide
atggccttaccagtgaccgccttgctcctgccgctggccttgctgctccacgccgccaggccggcatgcgaagtgcagctgcttgaaagtggcggcggactgattcagcctggcggatctctgagactgagctgtgccgccagcggcttcaccttttctagccacgccatgacctgggtccgacaggcacctggaaaagggcttgaatgggtgtccgccatcagcggctctggcgattacacacactacgccgacagcgtgaagggcagattcaccatcagcagagacaacagcaagaacaccgtgtacctccagatgaacagcctgagagccgaggacagcgccgtgtattattgcgccaaggatgaggatggcggcagcctgcttggacacagaggacaaggcaccctggtcaccgtttcttccggtaccggcggaggcggatctggcggcggaggtagcggtggcggaggatctgaattcgacatccagatgacacagagccctagcagcctgtctgccagcgtgggagacagagtgaccatcacatgcaaggccagcgaccacatcaacaactggctggcctggtatcagcagaagcctggacaggcccctaagctgctgatctacggcgctaccacactggaaacaggcgtgcccagcagattttctggcagcggctctggcaccgactacaccctgacaatatccagcctccagcctgaggacttcgccacctactactgtcagcagagctggaacaccccttggacattcggccagggcaccaagctggaaatcaagagactcgagggacagcctaaggccaatcctaccgtgacactgttccctccaagcagcgaagaactccaggccaacaaggccacacttgtgtgcctgatctccgacttctaccctggggctgtgacagtggcttggaaggccgatggatctcctgtgaaagccggcgtggaaaccaccaagccatccaagcagagcaacaacaaatacgccgccagctcctacctgagcctgacacctgagcagtggaagtcccacagatcctacagctgccaagtgacccacgaaggcagcaccgtggaaaagacagtggcccctacagagtgcagccccatcaagaccgatgtgattacaatggaccccaaggacaactgctccaaggacgccaacgataccctgctgctccagctgaccaacaccagcgcctactacatgtacttgttgctgctgctgaagtccgtggtgtacttcgccatcatcacatgctgcctgctgcggagaaccgccttctgctgcaacggcgagaagtctagggccaagcgatctggatctggagcaacaaacttctcactactcaaacaagcaggtgacgtggaggagaatcccgggcctactagtgccaccatggactggatttggcgcatccttttccttgtcggcgctgctaccggcgcccattccgggccccaggttcagctgcaagagtctggcggaggacttgctcaagctggcggaagcctgagactgtcttgtgccgcctctggcagaaccttcagcatgggctggtttagacaggcccctggcaaagagagagagttcgtcgccgccatcacatacagcggcggcagcccttactacgcctcttctgtcagaggccggttcaccatcagccgggacaacgccaagaacaccgtgtacctccagatgaacagcctgaagccagaggacaccgccgtgtactactgtgccgccaatccaacctacggcagcgactggaatgccgagaattggggccagggcacccaagtgacagtgtctagtggatccggcggcggaggatctggcggaggcggatctgggggcggaggctctttcgaagacctctttaatcaagaagtccagattccactcaccgaatcctactgcggaccttgtccaaaaaattggatttgttataagaacaactgttatcaattctttgatgagtctaaaaattggtatgagtcccaggcttcctgcatgtctcagaacgcttctctgctgaaagtctactctaaagaagatcaggatctcctgaagctcgtcaagtctgcccattggatggggctcgtccacattcctaccaacggaagctggcaatgggaagatggctccatcctgtctccaaatctgctcacgattattgaaatgcagaaaggggattgtgctctctacgccagctccttcaagggatttattgagaactgtagcacgcccaatacttatatctgtatgcaacggaccgtgacgcgtgcctctacaaagggaccctccgtgtttcctctggctcccagcagcaagtctacaagcggaggaacagccgctctgggctgcctggtcaaggattactttcccgagcctgtgaccgtgtcctggaatagcggagcactgacaagcggcgtgcacacctttccagccgtgctgcaaagcagcggcctgtactctctgagcagcgtggtcacagtgcctagctctagcctgggcacccagacctacatctgcaatgtgaaccacaagcctagcaacaccaaggtggacaagagagtggaacccaagagctgtgaagtgaaaaccgactccaccgaccacgtgaagcccaaagagacagagaacaccaagcagcccagcaagagctgccacaagcccaaggccatcgtgcacaccgagaaagtgaacatgatgagcctgaccgtgctgggcctgcggatgctgttcgccaaaaccgtggccgtgaacttcctgctgaccgccaagctgttcttcctccgcgccaagagaagcggatctggcgtgaagcagaccctgaatttcgacctgctgaagctggctggcgacgtggaatccaacccaggcccttctagaggccatatgaccgagtacaagcccacggtgcgcctcgccacccgcgacgacgtccccagggccgtacgcaccctcgccgccgcgttcgccgactaccccgccacgcgccacaccgtcgatccggaccgccacatcgagcgggtcaccgagctgcaagaactcttcctcacgcgcgtcgggctcgacatcggcaaggtgtgggtcgcggacgacggcgccgcggtggcggtctggaccacgccggagagcgtcgaagcgggggcggtgttcgccgagatcggcccgcgcatggccgagttgagcggttcccggctggccgcgcagcaacagatggaaggcctcctggcgccgcaccggcccaaggagcccgcgtggttcctggccaccgtcggcgtctcgcccgaccaccagggcaagggtctgggcagcgccgtcgtgctccccggagtggaggcggccgagcgcgccggggtgcccgccttcctggagacctccgcgccccgcaacctccccttctacgagcggctcggcttcaccgtcaccgccgacgtcgaggtgcccgaaggaccgcgcacctggtgcatgacccgcaagcccggtgcctga

SEQ ID NO: 22291 - DNA, 2850 bp, Artificial Sequence
  Synthetic Polynucleotide
atggccttaccagtgaccgccttgctcctgccgctggccttgctgctccacgccgccaggccggacatccagatgacacagagccctagcagcctgtctgccagcgtgggagacagagtgaccatcacatgcaaggccagcgaccacatcaacaactggctggcctggtatcagcagaagcctggacaggcccctaagctgctgatctacggcgctaccacactggaaacaggcgtgcccagcagattttctggcagcggctctggcaccgactacaccctgacaatatccagcctccagcctgaggacttcgccacctactactgtcagcagagctggaacaccccttggacattcggccagggcaccaagctggaaatcaagagactcgaggacctgaagaacgtgttcccacctgaggtggccgtgttcgagcctagcgaggccgagatcagccacacccagaaagccaccctcgtgtgcctggctaccggcttctaccccgaccatgtggaactgtcttggtgggtcaacggcaaagaggtgcacagcggcgtgtgtaccgacccccagccactgaaagaacagcccgccctgaacgacagccggtactgcctgagcagcagactgagagtgtccgccaccttctggcagaacccccggaaccacttcagatgccaggtgcagttctacggcctgagcgagaacgacgagtggacccaggacagagccaagcccgtgacccagatcgtgtctgccgaagcctggggcagagccgattgcggctttaccagcgagagctaccagcagggcgtgctgagcgccaccatcctgtacgagatcctgctgggcaaggccaccctgtacgccgtgctggtgtctgccctggtgctgatggctatggtcaagcggaaggacagccggggaagggccaagcgatctggatctggagcaacaaacttctcactactcaaacaagcaggtgacgtggaggagaatcccgggcctactagtgccaccatggactggatttggcgcatccttttccttgtcggcgctgctaccggcgcccattccgggcccatgggaagctggcttgagttctaccacagactcaacgccattgacagcaggctgtgggcacttggcggaagcgaagctgaactcgccgcttttgaaaaagaaattgccgctttcgagtccgagcttcaggcttacaaaggcaaagggaatcctgaggtcgagagcctgagagatcacgctgcccacattagagagtggttgcaggcataccggcacaatggatccggcggcggaggatctggcggaggcggatctgggggcggaggctctttcgaacaagttcagcttcaacagcctggcgctgagctggtcaaacctggcgcttctgtgaagatgagctgcaaagccagcggctacgccttcagcagctactggatcaactggatgaagcagaaacccggccagggactcgaatggatcggccaaatctatcccggcgacggcgacaccaactacaacggcaagttcaagggcagagccacactgaccgccgatacctctagcagcacagcctacatgcagctgagcagcctgaccagcgaagatagcgccgtgtacttctgtgcccggtccatcacaacagtcgtgggctgcgctatggactattggggccagggaacaagcgtgaccgtgtctagtacgcgtatccagaaccctgatcctgccgtgtaccagctgcgggatagcaagagcagcgacaagagcgtgtgtctgttcaccgacttcgacagccagaccaacgtgtcccagagcaaggactccgacgtgtacatcaccgataagtgcgtgctggacatgcggagcatggacttcaagagcaactccgccgtggcctggtccaacaagtccgatttcgcctgcgccaacgccttcaacaacagcattatccccgaggacacattcttcccaagccccgagagcagctgcgacgtgaagctggtggaaaagagcttcgagacagacaccaacctgaacttccagaacctgagcgtgatcggcttcagaatcctgctgctgaaagtggccggctttaacctgctgatgaccctgcggctgtggtccagccgcgccaagagaagcggatctggcgtgaagcagaccctgaatttcgacctgctgaagctggctggcgacgtggaatccaacccaggcccttctagaggccatatgaccgagtacaagcccacggtgcgcctcgccacccgcgacgacgtccccagggccgtacgcaccctcgccgccgcgttcgccgactaccccgccacgcgccacaccgtcgatccggaccgccacatcgagcgggtcaccgagctgcaagaactcttcctcacgcgcgtcgggctcgacatcggcaaggtgtgggtcgcggacgacggcgccgcggtggcggtctggaccacgccggagagcgtcgaagcgggggcggtgttcgccgagatcggcccgcgcatggccgagttgagcggttcccggctggccgcgcagcaacagatggaaggcctcctggcgccgcaccggcccaaggagcccgcgtggttcctggccaccgtcggcgtctcgcccgaccaccagggcaagggtctgggcagcgccgtcgtgctccccggagtggaggcggccgagcgcgccggggtgcccgccttcctggagacctccgcgccccgcaacctccccttctacgagcggctcggcttcaccgtcaccgccgacgtcgaggtgcccgaaggaccgcgcacctggtgcatgacccgcaagcccggtgcctga

SEQ ID NO: 22292 - DNA, 2850 bp, Artificial Sequence
  Synthetic Polynucleotide
atggccttaccagtgaccgccttgctcctgccgctggccttgctgctccacgccgccaggccggcatgcatgggcagttggttcgagttctacgaccggctgaatgccatcgacgccagactgtgggctctcggaggatctgaagctgagctggccgccttcgagaaagagatcgccgcctttgagagcgagctgcaagcctacaaaggcaagggcaaccccgaggtggaaaacctgagagtgcacgccgctgccatcagagaatggctccaggcttacagacacaacggtaccggcggaggcggatctggcggcggaggtagcggtggcggaggatctgaattcgacatccagatgacacagagccctagcagcctgtctgccagcgtgggagacagagtgaccatcacatgcaaggccagcgaccacatcaacaactggctggcctggtatcagcagaagcctggacaggcccctaagctgctgatctacggcgctaccacactggaaacaggcgtgcccagcagattttctggcagcggctctggcaccgactacaccctgacaatatccagcctccagcctgaggacttcgccacctactactgtcagcagagctggaacaccccttggacattcggccagggcaccaagctggaaatcaagagactcgaggacctgaagaacgtgttcccacctgaggtggccgtgttcgagcctagcgaggccgagatcagccacacccagaaagccaccctcgtgtgcctggctaccggcttctaccccgaccatgtggaactgtcttggtgggtcaacggcaaagaggtgcacagcggcgtgtgtaccgacccccagccactgaaagaacagcccgccctgaacgacagccggtactgcctgagcagcagactgagagtgtccgccaccttctggcagaacccccggaaccacttcagatgccaggtgcagttctacggcctgagcgagaacgacgagtggacccaggacagagccaagcccgtgacccagatcgtgtctgccgaagcctggggcagagccgattgcggctttaccagcgagagctaccagcagggcgtgctgagcgccaccatcctgtacgagatcctgctgggcaaggccaccctgtacgccgtgctggtgtctgccctggtgctgatggctatggtcaagcggaaggacagccggggaagggccaagcgatctggatctggagcaacaaacttctcactactcaaacaagcaggtgacgtggaggagaatcccgggcctactagtatggactggatttggcgcatccttttccttgtcggcgctgctaccggcgcgcattccttcgaacaagttcagcttcaacagcctggcgctgagctggtcaaacctggcgcttctgtgaagatgagctgcaaagccagcggctacgccttcagcagctactggatcaactggatgaagcagaaacccggccagggactcgaatggatcggccaaatctatcccggcgacggcgacaccaactacaacggcaagttcaagggcagagccacactgaccgccgatacctctagcagcacagcctacatgcagctgagcagcctgaccagcgaagatagcgccgtgtacttctgtgcccggtccatcacaacagtcgtgggctgcgctatggactattggggccagggaacaagcgtgaccgtgtctagtacgcgtatccagaaccctgatcctgccgtgtaccagctgcgggatagcaagagcagcgacaagagcgtgtgtctgttcaccgacttcgacagccagaccaacgtgtcccagagcaaggactccgacgtgtacatcaccgataagtgcgtgctggacatgcggagcatggacttcaagagcaactccgccgtggcctggtccaacaagtccgatttcgcctgcgccaacgccttcaacaacagcattatccccgaggacacattcttcccaagccccgagagcagctgcgacgtgaagctggtggaaaagagcttcgagacagacaccaacctgaacttccagaacctgagcgtgatcggcttcagaatcctgctgctgaaagtggccggctttaacctgctgatgaccctgcggctgtggtccagccgcgccaagagaagcggatctggcgtgaagcagaccctgaatttcgacctgctgaagctggctggcgacgtggaatccaacccaggcccttctagaggccatatgaccgagtacaagcccacggtgcgcctcgccacccgcgacgacgtccccagggccgtacgcaccctcgccgccgcgttcgccgactaccccgccacgcgccacaccgtcgatccggaccgccacatcgagcgggtcaccgagctgcaagaactcttcctcacgcgcgtcgggctcgacatcggcaaggtgtgggtcgcggacgacggcgccgcggtggcggtctggaccacgccggagagcgtcgaagcgggggcggtgttcgccgagatcggcccgcgcatggccgagttgagcggttcccggctggccgcgcagcaacagatggaaggcctcctggcgccgcaccggcccaaggagcccgcgtggttcctggccaccgtcggcgtctcgcccgaccaccagggcaagggtctgggcagcgccgtcgtgctccccggagtggaggcggccgagcgcgccggggtgcccgccttcctggagacctccgcgccccgcaacctccccttctacgagcggctcggcttcaccgtcaccgccgacgtcgaggtgcccgaaggaccgcgcacctggtgcatgacccgcaagcccggtgcctga

SEQ ID NO: 22293 - DNA, 3201 bp, Artificial Sequence
  Synthetic Polynucleotide
atggccttaccagtgaccgccttgctcctgccgctggccttgctgctccacgccgccaggccggcatgcatggaccccgacctggaaatcagagccgccttcctgcggcagagaaacacagccctgagaacagaggtggccgagctggaacaagaggtgcagcggctggaaaacgaggtgtcccagtacgagacaagatacggccctctcggaggcggaaaaggtaccggcggaggcggatctggcggcggaggtagcggtggcggaggatctgaattcgacatccagatgacacagagccctagcagcctgtctgccagcgtgggagacagagtgaccatcacatgcaaggccagcgaccacatcaacaactggctggcctggtatcagcagaagcctggacaggcccctaagctgctgatctacggcgctaccacactggaaacaggcgtgcccagcagattttctggcagcggctctggcaccgactacaccctgacaatatccagcctccagcctgaggacttcgccacctactactgtcagcagagctggaacaccccttggacattcggccagggcaccaagctggaaatcaagagactcgaggacctgaagaacgtgttcccacctgaggtggccgtgttcgagcctagcgaggccgagatcagccacacccagaaagccaccctcgtgtgcctggctaccggcttctaccccgaccatgtggaactgtcttggtgggtcaacggcaaagaggtgcacagcggcgtgtgtaccgacccccagccactgaaagaacagcccgccctgaacgacagccggtactgcctgagcagcagactgagagtgtccgccaccttctggcagaacccccggaaccacttcagatgccaggtgcagttctacggcctgagcgagaacgacgagtggacccaggacagagccaagcccgtgacccagatcgtgtctgccgaagcctggggcagagccgattgcggctttaccagcgagagctaccagcagggcgtgctgagcgccaccatcctgtacgagatcctgctgggcaaggccaccctgtacgccgtgctggtgtctgccctggtgctgatggctatggtcaagcggaaggacagccggggaagggccaagcgatctggatctggagcaacaaacttctcactactcaaacaagcaggtgacgtggaggagaatcccgggcctactagtgccaccatggactggatttggcgcatccttttccttgtcggcgctgctaccggcgcccattccgggcccgaagtgcagctggttgaatctggcggaggactggttcaggctggcggatctctgagactgtcttgtgccgccagcggcagaacctttagcatgggctggtttagacaggcccctggcaaagagagagagttcgtcgccgccatcacatactctggcggcagcccttactacgccgactctgtgaagggcagattcaccatcagccgggacaacgccaagaacaccgtgtacctccagatgaacagcctgaagcctgaggacaccgccgtgtactactgcgccgccaatccaacatacggcagcgactggaacgccgagaattggggccagggaacccaagtgacagtgtctagcggatccggcggcggaggatctggcggaggcggatctgggggcggaggctctttcgaacaagttcagcttcaacagcctggcgctgagctggtcaaacctggcgcttctgtgaagatgagctgcaaagccagcggctacgccttcagcagctactggatcaactggatgaagcagaaacccggccagggactcgaatggatcggccaaatctatcccggcgacggcgacaccaactacaacggcaagttcaagggcagagccacactgaccgccgatacctctagcagcacagcctacatgcagctgagcagcctgaccagcgaagatagcgccgtgtacttctgtgcccggtccatcacaacagtcgtgggctgcgctatggactattggggccagggaacaagcgtgaccgtgtctagtacgcgtatccagaaccctgatcctgccgtgtaccagctgcgggatagcaagagcagcgacaagagcgtgtgtctgttcaccgacttcgacagccagaccaacgtgtcccagagcaaggactccgacgtgtacatcaccgataagtgcgtgctggacatgcggagcatggacttcaagagcaactccgccgtggcctggtccaacaagtccgatttcgcctgcgccaacgccttcaacaacagcattatccccgaggacacattcttcccaagccccgagagcagctgcgacgtgaagctggtggaaaagagcttcgagacagacaccaacctgaacttccagaacctgagcgtgatcggcttcagaatcctgctgctgaaagtggccggctttaacctgctgatgaccctgcggctgtggtccagccgcgccaagagaagcggatctggcgtgaagcagaccctgaatttcgacctgctgaagctggctggcgacgtggaatccaacccaggcccttctagaggccatatgaccgagtacaagcccacggtgcgcctcgccacccgcgacgacgtccccagggccgtacgcaccctcgccgccgcgttcgccgactaccccgccacgcgccacaccgtcgatccggaccgccacatcgagcgggtcaccgagctgcaagaactcttcctcacgcgcgtcgggctcgacatcggcaaggtgtgggtcgcggacgacggcgccgcggtggcggtctggaccacgccggagagcgtcgaagcgggggcggtgttcgccgagatcggcccgcgcatggccgagttgagcggttcccggctggccgcgcagcaacagatggaaggcctcctggcgccgcaccggcccaaggagcccgcgtggttcctggccaccgtcggcgtctcgcccgaccaccagggcaagggtctgggcagcgccgtcgtgctccccggagtggaggcggccgagcgcgccggggtgcccgccttcctggagacctccgcgccccgcaacctccccttctacgagcggctcggcttcaccgtcaccgccgacgtcgaggtgcccgaaggaccgcgcacctggtgcatgacccgcaagcccggtgcctga

SEQ ID NO: 22294 - DNA, 1791 bp, Artificial Sequence
  Synthetic Polynucleotide
atggccttaccagtgaccgccttgctcctgccgctggccttgctgctccacgccgccaggccgcagctccagctgcaagagtctggacctggcctggtcaagcctagcgagacactgagcctgacctgtaccgtgtccggcgatagcatcagcagcggcgattactactggggctggatcagacagcctcctggcaaaggactggaatggatcggccacatctactacagcggcgtgacctactacaaccccagcctgaagtccagagtgaccatcagcgtggacaccagccggaaccagttctccctgaagctgtctagcgtgacagccgccgataccgccgtgtactactgcaccagagaggacagcagcaactggcggagtagaggccagggaacactggtcacagttagctctctcgagggctctatccccgaggacacattcttcccaagccccgagagcagctgcgacgtgaagctggtggaaaagagcttcgagacagacaccaacctgaacttccagaacctgagcgtgatcggcttcagaatcctgctgctgaaagtggccggctttaacctgctgatgaccctgcggctgtggtccagccgcgccaagagaagcggatctggcgtgaagcagaccctgaatttcgacctgctgaagctggctggcgacgtggaatccaacccaggccctactagtgccaccatggactggatttggcgcatccttttccttgtcggcgctgctaccggcgcccattccgaattcatggaccccgacctggaaatcagagccgccttcctgcggcagagaaacacagccctgagaacagaggtggccgagctggaacaagaggtgcagcggctggaaaacgaggtgtcccagtacgagacaagatacggccctctcggaggcggaaaaacgcgtggatctggcagagccgattgcggctttaccagcgagagctaccagcagggcgtgctgagcgccaccatcctgtacgagatcctgctgggcaaggccaccctgtacgccgtgctggtgtctgccctggtgctgatggctatggtcaagcggaaggacagccggggaagggccaagcgatctggatctggagcaacaaacttctcactactcaaacaagcaggtgacgtggaggagaatcccgggccttctagaggccatatgaccgagtacaagcccacggtgcgcctcgccacccgcgacgacgtccccagggccgtacgcaccctcgccgccgcgttcgccgactaccccgccacgcgccacaccgtcgatccggaccgccacatcgagcgggtcaccgagctgcaagaactcttcctcacgcgcgtcgggctcgacatcggcaaggtgtgggtcgcggacgacggcgccgcggtggcggtctggaccacgccggagagcgtcgaagcgggggcggtgttcgccgagatcggcccgcgcatggccgagttgagcggttcccggctggccgcgcagcaacagatggaaggcctcctggcgccgcaccggcccaaggagcccgcgtggttcctggccaccgtcggcgtctcgcccgaccaccagggcaagggtctgggcagcgccgtcgtgctccccggagtggaggcggccgagcgcgccggggtgcccgccttcctggagacctccgcgccccgcaacctccccttctacgagcggctcggcttcaccgtcaccgccgacgtcgaggtgcccgaaggaccgcgcacctggtgcatgacccgcaagcccggtgcctga

SEQ ID NO: 22295 - DNA, 2850 bp, Artificial Sequence
  Synthetic Polynucleotide
atggccttaccagtgaccgccttgctcctgccgctggccttgctgctccacgccgccaggccggacatccagatgacacagagccctagcagcctgtctgccagcgtgggagacagagtgaccatcacatgcaaggccagcgaccacatcaacaactggctggcctggtatcagcagaagcctggacaggcccctaagctgctgatctacggcgctaccacactggaaacaggcgtgcccagcagattttctggcagcggctctggcaccgactacaccctgacaatatccagcctccagcctgaggacttcgccacctactactgtcagcagagctggaacaccccttggacattcggccagggcaccaagctggaaatcaagagactcgaggacctgaagaacgtgttcccacctgaggtggccgtgttcgagcctagcgaggccgagatcagccacacccagaaagccaccctcgtgtgcctggctaccggcttctaccccgaccatgtggaactgtcttggtgggtcaacggcaaagaggtgcacagcggcgtgtgtaccgacccccagccactgaaagaacagcccgccctgaacgacagccggtactgcctgagcagcagactgagagtgtccgccaccttctggcagaacccccggaaccacttcagatgccaggtgcagttctacggcctgagcgagaacgacgagtggacccaggacagagccaagcccgtgacccagatcgtgtctgccgaagcctggggcagagccgattgcggctttaccagcgagagctaccagcagggcgtgctgagcgccaccatcctgtacgagatcctgctgggcaaggccaccctgtacgccgtgctggtgtctgccctggtgctgatggctatggtcaagcggaaggacagccggggaagggccaagcgatctggatctggagcaacaaacttctcactactcaaacaagcaggtgacgtggaggagaatcccgggcctactagtgccaccatggactggatttggcgcatccttttccttgtcggcgctgctaccggcgcccattccgggcccatgggatcttggagcgagttttacgatcggctgcacgccattcaccaccggctgtatgctctcggaggaagcgaagctgagctggccgcttttgaaaaagaaattgccgctttcgagtccgagcttcaggcttacaaaggcaaagggaatcctgaggtcgaggccctgagagataccgccgccttcatcagaacccggttgcaggcataccggcacaacggatccggcggcggaggatctggcggaggcggatctgggggcggaggctctttcgaacaagttcagcttcaacagcctggcgctgagctggtcaaacctggcgcttctgtgaagatgagctgcaaagccagcggctacgccttcagcagctactggatcaactggatgaagcagaaacccggccagggactcgaatggatcggccaaatctatcccggcgacggcgacaccaactacaacggcaagttcaagggcagagccacactgaccgccgatacctctagcagcacagcctacatgcagctgagcagcctgaccagcgaagatagcgccgtgtacttctgtgcccggtccatcacaacagtcgtgggctgcgctatggactattggggccagggaacaagcgtgaccgtgtctagtacgcgtatccagaaccctgatcctgccgtgtaccagctgcgggatagcaagagcagcgacaagagcgtgtgtctgttcaccgacttcgacagccagaccaacgtgtcccagagcaaggactccgacgtgtacatcaccgataagtgcgtgctggacatgcggagcatggacttcaagagcaactccgccgtggcctggtccaacaagtccgatttcgcctgcgccaacgccttcaacaacagcattatccccgaggacacattcttcccaagccccgagagcagctgcgacgtgaagctggtggaaaagagcttcgagacagacaccaacctgaacttccagaacctgagcgtgatcggcttcagaatcctgctgctgaaagtggccggctttaacctgctgatgaccctgcggctgtggtccagccgcgccaagagaagcggatctggcgtgaagcagaccctgaatttcgacctgctgaagctggctggcgacgtggaatccaacccaggcccttctagaggccatatgaccgagtacaagcccacggtgcgcctcgccacccgcgacgacgtccccagggccgtacgcaccctcgccgccgcgttcgccgactaccccgccacgcgccacaccgtcgatccggaccgccacatcgagcgggtcaccgagctgcaagaactcttcctcacgcgcgtcgggctcgacatcggcaaggtgtgggtcgcggacgacggcgccgcggtggcggtctggaccacgccggagagcgtcgaagcgggggcggtgttcgccgagatcggcccgcgcatggccgagttgagcggttcccggctggccgcgcagcaacagatggaaggcctcctggcgccgcaccggcccaaggagcccgcgtggttcctggccaccgtcggcgtctcgcccgaccaccagggcaagggtctgggcagcgccgtcgtgctccccggagtggaggcggccgagcgcgccggggtgcccgccttcctggagacctccgcgccccgcaacctccccttctacgagcggctcggcttcaccgtcaccgccgacgtcgaggtgcccgaaggaccgcgcacctggtgcatgacccgcaagcccggtgcctga

SEQ ID NO: 22296 - DNA, 3480 bp, Artificial Sequence
  Synthetic Polynucleotide
atggccttaccagtgaccgccttgctcctgccgctggccttgctgctccacgccgccaggccggacatccagatgacacagagccctagcagcctgtctgccagcgtgggagacagagtgaccatcacatgcaaggccagcgaccacatcaacaactggctggcctggtatcagcagaagcctggacaggcccctaagctgctgatctacggcgctaccacactggaaacaggcgtgcccagcagattttctggcagcggctctggcaccgactacaccctgacaatatccagcctccagcctgaggacttcgccacctactactgtcagcagagctggaacaccccttggacattcggccagggcaccaagctggaaatcaagagactcgaggacctgaagaacgtgttcccacctgaggtggccgtgttcgagcctagcgaggccgagatcagccacacccagaaagccaccctcgtgtgcctggctaccggcttctaccccgaccatgtggaactgtcttggtgggtcaacggcaaagaggtgcacagcggcgtgtgtaccgacccccagccactgaaagaacagcccgccctgaacgacagccggtactgcctgagcagcagactgagagtgtccgccaccttctggcagaacccccggaaccacttcagatgccaggtgcagttctacggcctgagcgagaacgacgagtggacccaggacagagccaagcccgtgacccagatcgtgtctgccgaagcctggggcagagccgattgcggctttaccagcgagagctaccagcagggcgtgctgagcgccaccatcctgtacgagatcctgctgggcaaggccaccctgtacgccgtgctggtgtctgccctggtgctgatggctatggtcaagcggaaggacagccggggaagggccaagcgatctggatctggagcaacaaacttctcactactcaaacaagcaggtgacgtggaggagaatcccgggcctactagtaccatggactggatttggcgcatccttttccttgtcggcgctgctaccggcgcccattccctgttcaatcaagaggtgcagatccctctgaccgagagctactgtggcccctgtcctaagaactggatctgctacaagaacaactgctaccagttcttcgacgagagcaagaattggtacgagagccaggccagctgcatgagccagaatgccagcctgctgaaggtgtacagcaaagaggaccaggacctgctgaaactggtcaagagcgcccactggatgggccttgtgcacatccccaccaatggctcttggcagtgggaggacggcagcattctgagccctaacctgctgaccatcatcgagatgcagaagggcgactgcgccctgtacgccagcagctttaagggctacatcgagaattgcagcaccccgaacacctacatctgtatgcagagaaccgtttctggcggaggcggctctggaggaggcggaagtggcggcggaggcgacctctttaatcaagaagtccagattccactcaccgaatcctactgcggaccttgtccaaaaaattggatttgttataagaacaactgttatcaattctttgatgagtctaaaaattggtatgagtcccaggcttcctgcatgtctcagaacgcttctctgctgaaagtctactctaaagaagatcaggatctcctgaagctcgtcaagtctgcccattggatggggctcgtccacattcctaccaacggaagctggcaatgggaagatggctccatcctgtctccaaatctgctcacgattattgaaatgcagaaaggggattgtgctctctacgccagctccttcaagggatatattgagaactgtagcacgcccaatacttatatctgtatgcaacggaccgtgggatccggcggcggaggatctggcggaggcggatctgggggcggaggctctttcgaacaagttcagcttcaacagcctggcgctgagctggtcaaacctggcgcttctgtgaagatgagctgcaaagccagcggctacgccttcagcagctactggatcaactggatgaagcagaaacccggccagggactcgaatggatcggccaaatctatcccggcgacggcgacaccaactacaacggcaagttcaagggcagagccacactgaccgccgatacctctagcagcacagcctacatgcagctgagcagcctgaccagcgaagatagcgccgtgtacttctgtgcccggtccatcacaacagtcgtgggctgcgctatggactattggggccagggaacaagcgtgaccgtgtctagtacgcgtatccagaaccctgatcctgccgtgtaccagctgcgggatagcaagagcagcgacaagagcgtgtgtctgttcaccgacttcgacagccagaccaacgtgtcccagagcaaggactccgacgtgtacatcaccgataagtgcgtgctggacatgcggagcatggacttcaagagcaactccgccgtggcctggtccaacaagtccgatttcgcctgcgccaacgccttcaacaacagcattatccccgaggacacattcttcccaagccccgagagcagctgcgacgtgaagctggtggaaaagagcttcgagacagacaccaacctgaacttccagaacctgagcgtgatcggcttcagaatcctgctgctgaaagtggccggctttaacctgctgatgaccctgcggctgtggtccagccgcgccaagagaagcggatctggcgtgaagcagaccctgaatttcgacctgctgaagctggctggcgacgtggaatccaacccaggcccttctagaggccatatgaccgagtacaagcccacggtgcgcctcgccacccgcgacgacgtccccagggccgtacgcaccctcgccgccgcgttcgccgactaccccgccacgcgccacaccgtcgatccggaccgccacatcgagcgggtcaccgagctgcaagaactcttcctcacgcgcgtcgggctcgacatcggcaaggtgtgggtcgcggacgacggcgccgcggtggcggtctggaccacgccggagagcgtcgaagcgggggcggtgttcgccgagatcggcccgcgcatggccgagttgagcggttcccggctggccgcgcagcaacagatggaaggcctcctggcgccgcaccggcccaaggagcccgcgtggttcctggccaccgtcggcgtctcgcccgaccaccagggcaagggtctgggcagcgccgtcgtgctccccggagtggaggcggccgagcgcgccggggtgcccgccttcctggagacctccgcgccccgcaacctccccttctacgagcggctcggcttcaccgtcaccgccgacgtcgaggtgcccgaaggaccgcgcacctggtgcatgacccgcaagcccggtgcctga

SEQ ID NO: 22297 - DNA, 27 bp, Artificial Sequence
  Synthetic Polynucleotide
ggggggggggggggggggggggggggg

SEQ ID NO: 22298 - DNA, 3462 bp, Artificial Sequence
  Synthetic Polynucleotide
atggccttaccagtgaccgccttgctcctgccgctggccttgctgctccacgccgccaggccggacatccagatgacacagagccctagcagcctgtctgccagcgtgggagacagagtgaccatcacatgcaaggccagcgaccacatcaacaactggctggcctggtatcagcagaagcctggacaggcccctaagctgctgatctacggcgctaccacactggaaacaggcgtgcccagcagattttctggcagcggctctggcaccgactacaccctgacaatatccagcctccagcctgaggacttcgccacctactactgtcagcagagctggaacaccccttggacattcggccagggcaccaagctggaaatcaagagaggcggaggcggaagtggaggcggaggatctggcggcggaggctctcaagttcagcttcaacagcctggcgctgagctggtcaaacctggcgcttctgtgaagatgagctgcaaagccagcggctacgccttcagcagctactggatcaactggatgaagcagaaacccggccagggactcgaatggatcggccaaatctatcccggcgacggcgacaccaactacaacggcaagttcaagggcagagccacactgaccgccgatacctctagcagcacagcctacatgcagctgagcagcctgaccagcgaagatagcgccgtgtacttctgtgcccggtccatcacaacagtcgtgggctgcgctatggactattggggccagggaacaagcgtgaccgtgtctagtacgcgtggaggtggtggctccgagcctcacagcctgagctacgacatcacagtgatccccaagttcagacccggaccacgttggtgcgctgtgcagggacaagtggacgagaaaaccttcctgcactacgactgcggcaacaagaccgtgacacccgtgtctccactgggcaagaaactgaacgtgaccaccgcctggaaggcccagaatcctgtgctgagagaagtggtggacatcctgaccgagcagctgtgggacattcagctggaaaactacacccctaaagagcccctgacactccaggccagaatgagctgtgaacagaaggccgagggccacagctctggctcttggcagttcagcttcgacggccagattttcctgctgttcgacagcgagaagcggatgtggaccacagtgcatcccggcgctcgcaagatgaaggaaaagtgggagaacgacaaggtggtggctaccctgctgtggggctggtctatgggagattgcatcggctggctggaagatttcctgatgggcatggacagcaccctggaaccttctggatcctctggaagcggcgcatggtctcatcctcagtttgaaaaaggtggagggtccgggggcggcagtggtggtagtgcttggtcccatccacagtttgaaaagctcgagagagcaaagcgaagtggtagcggagcaaccaacttttctctgctcaagcaagccggtgacgtggaagagaaccctggtcctgaattcatgaccacctccgcctcctcccacctaaacaagggcatcaagcaggtctacatgtccctcccccagggcgagaaggtccaggccatgtacatctggatcgacggcaccggcgagggcctccgctgcaagacccgcaccctcgactccgagcccaagtgcgtcgaggagctccccgagtggaacttcgacggctcctccaccctccagtccgagggctccaactccgacatgtacctcgtccccgccgccatgttccgcgaccccttccgcaaggaccccaacaagctcgtcctctgcgaggtcttcaagtacaaccgccgccccgccgagaccaacctccgccacacctgcaagcgcatcatggacatggtctccaaccagcacccctggttcggcatggagcaggagtacaccctcatgggcaccgacggccaccccttcggctggccctccaacggcttccccggcccccagggcccctactactgcggcgtcggcgccgaccgcgcctacggcagagatattgtggaagcccactaccgggcctgtctgtatgccggcgtgaagatcgccggcaccaatgccgaagttatgcccgctcagtgggagttccagatcggcccttgtgaaggcatcagcatgggcgatcatctgtgggtcgcccgcttcattctgcaccgcgtgtgcgaggatttcggcgtgatcgccaccttcgatcccaagcctattccaggcaactggaatggtgccggatgccacaccaacttcagcaccaaggccatgcgcgaggaaaacggcctgaagtacatcgaggaagccatcgagaagctgagcaagcgccaccagtaccacatccgcgcctacgatccaaaaggcggcctggataatgcccgccgtctgaccggattccacgaaaccagcaacatcaacgatttcagtgccggcgtcgccaatcgcagtgccagcattcgtattccccgcaccgtgggccaagagaagaagggctactttgaggatcgccgtccgagcgccaactgcgatccttttagtgtgacagaggccctgatccgcacatgcctgctgaatgagacaggcgacgagcccttccagtacaagaacactagtggctccggcgagggcagaggaagtctactaacctgcggagatgtggaagaaaatcctggcccaatggtgagcaagggcgaggagctgttcaccggggtggtgcccatcctggtcgagctggacggcgacgtaaacggccacaagttcagcgtgtccggcgagggcgagggcgatgccacctacggcaagctgaccctgaagttcatctgcaccaccggcaagctgcccgtgccctggcccaccctcgtgaccaccctgacctacggcgtgcagtgcttcagccgctaccccgaccacatgaagcagcacgacttcttcaagtccgccatgcccgaaggctacgtccaggagcgcaccatcttcttcaaggacgacggcaactacaagacccgcgccgaggtgaagttcgagggcgacaccctggtgaaccgcatcgagctgaagggcatcgacttcaaggaggacggcaacatcctggggcacaagctggagtacaactacaacagccacaacgtctatatcatggccgacaagcagaagaacggcatcaaggtgaacttcaagatccgccacaacatcgaggacggcagcgtgcagctcgccgaccactaccagcagaacacccccatcggcgacggccccgtgctgctgcccgacaaccactacctgagcacccagtccgccctgagcaaagaccccaacgagaagcgcgatcacatggtcctgctggagttcgtgaccgccgccgggatcactctcggcatggacgagctgtacaagtaa

SEQ ID NO: 22299 - DNA, 3123 bp, Artificial Sequence
  Synthetic Polynucleotide
atggccttaccagtgaccgccttgctcctgccgctggccttgctgctccacgccgccaggccggcatgcgaggtgcagctggttgaatctggtggcggagttgtgcagcctggcagaagcctgagactgtcttgtgccgccagcggctttagcttcagcggctatggaatgcactgggtccgacaggcccctggcaaaggacttgagtgggtcgcctacatcagctacgacggcagcaacaagtattacgccgacagcgtgaagggcagattcaccatcagccgggacaacagcaagaacaccctgtacctccagatgaacagcctgagagccgaggacaccgccgtgtactactgcgccaaagatcctgcctggggactgagactgggcgagagcagcagctacgatttcgactactggggccagggcacaatggtcacagtttctagcggtaccacgcgtggaggtggtggctccgagcctcacagcctgagctacgacatcacagtgatccccaagttcagacccggaccacgttggtgcgctgtgcagggacaagtggacgagaaaaccttcctgcactacgactgcggcaacaagaccgtgacacccgtgtctccactgggcaagaaactgaacgtgaccaccgcctggaaggcccagaatcctgtgctgagagaagtggtggacatcctgaccgagcagctgtgggacattcagctggaaaactacacccctaaagagcccctgacactccaggccagaatgagctgtgaacagaaggccgagggccacagctctggctcttggcagttcagcttcgacggccagattttcctgctgttcgacagcgagaagcggatgtggaccacagtgcatcccggcgctcgcaagatgaaggaaaagtgggagaacgacaaggtggtggctaccaagctgtacctgtggtctatgggcgactgcatcggctggctggaagatttcctgatgggcatggacagcaccctggaaccttctggatcctctggaagcggcgcatggtctcatcctcagtttgaaaaaggtggagggtccgggggcggcagtggtggtagtgcttggtcccatccacagtttgaaaagctcgagagagcaaagcgaagtggtagcggagcaaccaacttttctctgctcaagcaagccggtgacgtggaagagaaccctggtcctgaattcatgaccacctccgcctcctcccacctaaacaagggcatcaagcaggtctacatgtccctcccccagggcgagaaggtccaggccatgtacatctggatcgacggcaccggcgagggcctccgctgcaagacccgcaccctcgactccgagcccaagtgcgtcgaggagctccccgagtggaacttcgacggctcctccaccctccagtccgagggctccaactccgacatgtacctcgtccccgccgccatgttccgcgaccccttccgcaaggaccccaacaagctcgtcctctgcgaggtcttcaagtacaaccgccgccccgccgagaccaacctccgccacacctgcaagcgcatcatggacatggtctccaaccagcacccctggttcggcatggagcaggagtacaccctcatgggcaccgacggccaccccttcggctggccctccaacggcttccccggcccccagggcccctactactgcggcgtcggcgccgaccgcgcctacggcagagatattgtggaagcccactaccgggcctgtctgtatgccggcgtgaagatcgccggcaccaatgccgaagttatgcccgctcagtgggagttccagatcggcccttgtgaaggcatcagcatgggcgatcatctgtgggtcgcccgcttcattctgcaccgcgtgtgcgaggatttcggcgtgatcgccaccttcgatcccaagcctattccaggcaactggaatggtgccggatgccacaccaacttcagcaccaaggccatgcgcgaggaaaacggcctgaagtacatcgaggaagccatcgagaagctgagcaagcgccaccagtaccacatccgcgcctacgatccaaaaggcggcctggataatgcccgccgtctgaccggattccacgaaaccagcaacatcaacgatttcagtgccggcgtcgccaatcgcagtgccagcattcgtattccccgcaccgtgggccaagagaagaagggctactttgaggatcgccgtccgagcgccaactgcgatccttttagtgtgacagaggccctgatccgcacatgcctgctgaatgagacaggcgacgagcccttccagtacaagaacactagtggctccggcgagggcagaggaagtctactaacctgcggagatgtggaagaaaatcctggcccaatggtgagcaagggcgaggagctgttcaccggggtggtgcccatcctggtcgagctggacggcgacgtaaacggccacaagttcagcgtgtccggcgagggcgagggcgatgccacctacggcaagctgaccctgaagttcatctgcaccaccggcaagctgcccgtgccctggcccaccctcgtgaccaccctgacctacggcgtgcagtgcttcagccgctaccccgaccacatgaagcagcacgacttcttcaagtccgccatgcccgaaggctacgtccaggagcgcaccatcttcttcaaggacgacggcaactacaagacccgcgccgaggtgaagttcgagggcgacaccctggtgaaccgcatcgagctgaagggcatcgacttcaaggaggacggcaacatcctggggcacaagctggagtacaactacaacagccacaacgtctatatcatggccgacaagcagaagaacggcatcaaggtgaacttcaagatccgccacaacatcgaggacggcagcgtgcagctcgccgaccactaccagcagaacacccccatcggcgacggccccgtgctgctgcccgacaaccactacctgagcacccagtccgccctgagcaaagaccccaacgagaagcgcgatcacatggtcctgctggagttcgtgaccgccgccgggatcactctcggcatggacgagctgtacaagtaa

SEQ ID NO: 22300 - DNA, 3453 bp, Artificial Sequence
  Synthetic Polynucleotide
atggccttaccagtgaccgccttgctcctgccgctggccttgctgctccacgccgccaggccggacatccagatgacacagagccctagcagcctgtctgccagcgtgggagacagagtgaccatcacctgtagagccagccagggcatctcttcttggctggcctggtatcagcagaagcctggcaaggcccctaagctgctgatctatgccgccagctctctccagagcggagtgcctagcagattttctggcagcggctccggcaccgatttcaccctgacaatatccagcctccagcctgaggacttcgccacctactactgccagcagtacaacagctaccctctgaccttcggccagggcaccaaggtggaaatcaaaagaggcggaggcggaagtggaggcggaggatctggcggcggaggctctgaagtgcagctggttgaatcaggtggcggcctggttcaacctggcggatctctgagactgagctgtgccgcctccggcttcacctttagcgatcacggaatgcactgggtccgacaggcccctggaaaaggactggaatgggtcgccgtgatttggtacgacggcagcaacaagtattacgccgacagcgtgaagggcagattcaccatcagccgggacaacagcaagaacaccctgtacctccagatgaactccctgagagccgaggacaccgccgtgtactactgtgccagagacagcatcatggtccgaggcgattattggggccagggaaccctggtcacagtgtctagtacgcgtggaggtggtggctccgagcctcacagcctgagctacgacatcacagtgatccccaagttcagacccggaccacgttggtgcgctgtgcagggacaagtggacgagaaaaccttcctgcactacgactgcggcaacaagaccgtgacacccgtgtctccactgggcaagaaactgaacgtgaccaccgcctggaaggcccagaatcctgtgctgagagaagtggtggacatcctgaccgagcagctgtgggacattcagctggaaaactacacccctaaagagcccctgacactccaggccagaatgagctgtgaacagaaggccgagggccacagctctggctcttggcagttcagcttcgacggccagattttcctgctgttcgacagcgagaagcggatgtggaccacagtgcatcccggcgctcgcaagatgaaggaaaagtgggagaacgacaaggtggtggctaccaagctgtacctgtggtctatgggcgactgcatcggctggctggaagatttcctgatgggcatggacagcaccctggaaccttctggatcctctggaagcggcgcatggtctcatcctcagtttgaaaaaggtggagggtccgggggcggcagtggtggtagtgcttggtcccatccacagtttgaaaagctcgagagagcaaagcgaagtggtagcggagcaaccaacttttctctgctcaagcaagccggtgacgtggaagagaaccctggtcctgaattcatgaccacctccgcctcctcccacctaaacaagggcatcaagcaggtctacatgtccctcccccagggcgagaaggtccaggccatgtacatctggatcgacggcaccggcgagggcctccgctgcaagacccgcaccctcgactccgagcccaagtgcgtcgaggagctccccgagtggaacttcgacggctcctccaccctccagtccgagggctccaactccgacatgtacctcgtccccgccgccatgttccgcgaccccttccgcaaggaccccaacaagctcgtcctctgcgaggtcttcaagtacaaccgccgccccgccgagaccaacctccgccacacctgcaagcgcatcatggacatggtctccaaccagcacccctggttcggcatggagcaggagtacaccctcatgggcaccgacggccaccccttcggctggccctccaacggcttccccggcccccagggcccctactactgcggcgtcggcgccgaccgcgcctacggcagagatattgtggaagcccactaccgggcctgtctgtatgccggcgtgaagatcgccggcaccaatgccgaagttatgcccgctcagtgggagttccagatcggcccttgtgaaggcatcagcatgggcgatcatctgtgggtcgcccgcttcattctgcaccgcgtgtgcgaggatttcggcgtgatcgccaccttcgatcccaagcctattccaggcaactggaatggtgccggatgccacaccaacttcagcaccaaggccatgcgcgaggaaaacggcctgaagtacatcgaggaagccatcgagaagctgagcaagcgccaccagtaccacatccgcgcctacgatccaaaaggcggcctggataatgcccgccgtctgaccggattccacgaaaccagcaacatcaacgatttcagtgccggcgtcgccaatcgcagtgccagcattcgtattccccgcaccgtgggccaagagaagaagggctactttgaggatcgccgtccgagcgccaactgcgatccttttagtgtgacagaggccctgatccgcacatgcctgctgaatgagacaggcgacgagcccttccagtacaagaacactagtggctccggcgagggcagaggaagtctactaacctgcggagatgtggaagaaaatcctggcccaatggtgagcaagggcgaggagctgttcaccggggtggtgcccatcctggtcgagctggacggcgacgtaaacggccacaagttcagcgtgtccggcgagggcgagggcgatgccacctacggcaagctgaccctgaagttcatctgcaccaccggcaagctgcccgtgccctggcccaccctcgtgaccaccctgacctacggcgtgcagtgcttcagccgctaccccgaccacatgaagcagcacgacttcttcaagtccgccatgcccgaaggctacgtccaggagcgcaccatcttcttcaaggacgacggcaactacaagacccgcgccgaggtgaagttcgagggcgacaccctggtgaaccgcatcgagctgaagggcatcgacttcaaggaggacggcaacatcctggggcacaagctggagtacaactacaacagccacaacgtctatatcatggccgacaagcagaagaacggcatcaaggtgaacttcaagatccgccacaacatcgaggacggcagcgtgcagctcgccgaccactaccagcagaacacccccatcggcgacggccccgtgctgctgcccgacaaccactacctgagcacccagtccgccctgagcaaagaccccaacgagaagcgcgatcacatggtcctgctggagttcgtgaccgccgccgggatcactctcggcatggacgagctgtacaagtaa

SEQ ID NO: 22301 - DNA, 3123 bp, Artificial Sequence
  Synthetic Polynucleotide
atggccttaccagtgaccgccttgctcctgccgctggccttgctgctccacgccgccaggccggcatgcgaggtgcagctggttgaatctggtggcggagttgtgcagcctggcagaagcctgagactgtcttgtgccgccagcggctttagcttcagcggctatggaatgcactgggtccgacaggcccctggcaaaggacttgagtgggtcgcctacatcagctacgacggcagcaacaagtattacgccgacagcgtgaagggcagattcaccatcagccgggacaacagcaagaacaccctgtacctccagatgaacagcctgagagccgaggacaccgccgtgtactactgcgccaaagatcctgcctggggactgagactgggcgagagcagcagctacgatttcgactactggggccagggcacaatggtcacagtttctagcggtaccacgcgtggaggtggtggctccgagcctcacagcctgagctacgacatcacagtgatccccaagttcagacccggaccacgttggtgcgctgtgcagggacaagtggacgagaaaaccttcctgcactacgactgcggcaacaagaccgtgacacccgtgtctccactgggcaagaaactgaacgtgaccaccgcctggaaggcccagaatcctgtgctgagagaagtggtggacatcctgaccgagcagctgtgggacattcagctggaaaactacacccctaaagagcccctgacactccaggccagaatgagctgtgaacagaaggccgagggccacagctctggctcttggcagttcagcttcgacggccagattttcctgctgttcgacagcgagaagcggatgtggaccacagtgcatcccggcgctcgcaagatgaaggaaaagtgggagaacgacaaggtggtggctaccctgctgtggggctggtctatgggagattgcatcggctggctggaagatttcctgatgggcatggacagcaccctggaaccttctggatcctctggaagcggcgcatggtctcatcctcagtttgaaaaaggtggagggtccgggggcggcagtggtggtagtgcttggtcccatccacagtttgaaaagctcgagagagcaaagcgaagtggtagcggagcaaccaacttttctctgctcaagcaagccggtgacgtggaagagaaccctggtcctgaattcatgaccacctccgcctcctcccacctaaacaagggcatcaagcaggtctacatgtccctcccccagggcgagaaggtccaggccatgtacatctggatcgacggcaccggcgagggcctccgctgcaagacccgcaccctcgactccgagcccaagtgcgtcgaggagctccccgagtggaacttcgacggctcctccaccctccagtccgagggctccaactccgacatgtacctcgtccccgccgccatgttccgcgaccccttccgcaaggaccccaacaagctcgtcctctgcgaggtcttcaagtacaaccgccgccccgccgagaccaacctccgccacacctgcaagcgcatcatggacatggtctccaaccagcacccctggttcggcatggagcaggagtacaccctcatgggcaccgacggccaccccttcggctggccctccaacggcttccccggcccccagggcccctactactgcggcgtcggcgccgaccgcgcctacggcagagatattgtggaagcccactaccgggcctgtctgtatgccggcgtgaagatcgccggcaccaatgccgaagttatgcccgctcagtgggagttccagatcggcccttgtgaaggcatcagcatgggcgatcatctgtgggtcgcccgcttcattctgcaccgcgtgtgcgaggatttcggcgtgatcgccaccttcgatcccaagcctattccaggcaactggaatggtgccggatgccacaccaacttcagcaccaaggccatgcgcgaggaaaacggcctgaagtacatcgaggaagccatcgagaagctgagcaagcgccaccagtaccacatccgcgcctacgatccaaaaggcggcctggataatgcccgccgtctgaccggattccacgaaaccagcaacatcaacgatttcagtgccggcgtcgccaatcgcagtgccagcattcgtattccccgcaccgtgggccaagagaagaagggctactttgaggatcgccgtccgagcgccaactgcgatccttttagtgtgacagaggccctgatccgcacatgcctgctgaatgagacaggcgacgagcccttccagtacaagaacactagtggctccggcgagggcagaggaagtctactaacctgcggagatgtggaagaaaatcctggcccaatggtgagcaagggcgaggagctgttcaccggggtggtgcccatcctggtcgagctggacggcgacgtaaacggccacaagttcagcgtgtccggcgagggcgagggcgatgccacctacggcaagctgaccctgaagttcatctgcaccaccggcaagctgcccgtgccctggcccaccctcgtgaccaccctgacctacggcgtgcagtgcttcagccgctaccccgaccacatgaagcagcacgacttcttcaagtccgccatgcccgaaggctacgtccaggagcgcaccatcttcttcaaggacgacggcaactacaagacccgcgccgaggtgaagttcgagggcgacaccctggtgaaccgcatcgagctgaagggcatcgacttcaaggaggacggcaacatcctggggcacaagctggagtacaactacaacagccacaacgtctatatcatggccgacaagcagaagaacggcatcaaggtgaacttcaagatccgccacaacatcgaggacggcagcgtgcagctcgccgaccactaccagcagaacacccccatcggcgacggccccgtgctgctgcccgacaaccactacctgagcacccagtccgccctgagcaaagaccccaacgagaagcgcgatcacatggtcctgctggagttcgtgaccgccgccgggatcactctcggcatggacgagctgtacaagtaa

SEQ ID NO: 22302 - DNA, 3084 bp, Artificial Sequence
  Synthetic Polynucleotide
atggccttaccagtgaccgccttgctcctgccgctggccttgctgctccacgccgccaggccgcaggtgcagctggttgaatctggcggaggactggttcagcctggcggatctctgagactgtcttgtgccgccagcggcttcaccttcaccaatcacgccatgagctgggtccgacaggcccctggaaaaggactggaactggtgtctagcatcagcggcaacggcagaaccacctactacgccgatagcgtgaagggcagattcaccatcagccgggacatcagcaagaacaccctggacctccagatgaacagcctgagagccgaggataccgccgtgtactactgtgccaaggatggcggagagacactggtggatagcagaggccagggcacactggtcacagtgtcatctacgcgtggaggtggtggctccgagcctcacagcctgagctacgacatcacagtgatccccaagttcagacccggaccacgttggtgcgctgtgcagggacaagtggacgagaaaaccttcctgcactacgactgcggcaacaagaccgtgacacccgtgtctccactgggcaagaaactgaacgtgaccaccgcctggaaggcccagaatcctgtgctgagagaagtggtggacatcctgaccgagcagctgtgggacattcagctggaaaactacacccctaaagagcccctgacactccaggccagaatgagctgtgaacagaaggccgagggccacagctctggctcttggcagttcagcttcgacggccagattttcctgctgttcgacagcgagaagcggatgtggaccacagtgcatcccggcgctcgcaagatgaaggaaaagtgggagaacgacaaggtggtggctaccctgctgtggggctggtctatgggagattgcatcggctggctggaagatttcctgatgggcatggacagcaccctggaaccttctggatcctctggaagcggcgcatggtctcatcctcagtttgaaaaaggtggagggtccgggggcggcagtggtggtagtgcttggtcccatccacagtttgaaaagctcgagagagcaaagcgaagtggtagcggagcaaccaacttttctctgctcaagcaagccggtgacgtggaagagaaccctggtcctgaattcatgaccacctccgcctcctcccacctaaacaagggcatcaagcaggtctacatgtccctcccccagggcgagaaggtccaggccatgtacatctggatcgacggcaccggcgagggcctccgctgcaagacccgcaccctcgactccgagcccaagtgcgtcgaggagctccccgagtggaacttcgacggctcctccaccctccagtccgagggctccaactccgacatgtacctcgtccccgccgccatgttccgcgaccccttccgcaaggaccccaacaagctcgtcctctgcgaggtcttcaagtacaaccgccgccccgccgagaccaacctccgccacacctgcaagcgcatcatggacatggtctccaaccagcacccctggttcggcatggagcaggagtacaccctcatgggcaccgacggccaccccttcggctggccctccaacggcttccccggcccccagggcccctactactgcggcgtcggcgccgaccgcgcctacggcagagatattgtggaagcccactaccgggcctgtctgtatgccggcgtgaagatcgccggcaccaatgccgaagttatgcccgctcagtgggagttccagatcggcccttgtgaaggcatcagcatgggcgatcatctgtgggtcgcccgcttcattctgcaccgcgtgtgcgaggatttcggcgtgatcgccaccttcgatcccaagcctattccaggcaactggaatggtgccggatgccacaccaacttcagcaccaaggccatgcgcgaggaaaacggcctgaagtacatcgaggaagccatcgagaagctgagcaagcgccaccagtaccacatccgcgcctacgatccaaaaggcggcctggataatgcccgccgtctgaccggattccacgaaaccagcaacatcaacgatttcagtgccggcgtcgccaatcgcagtgccagcattcgtattccccgcaccgtgggccaagagaagaagggctactttgaggatcgccgtccgagcgccaactgcgatccttttagtgtgacagaggccctgatccgcacatgcctgctgaatgagacaggcgacgagcccttccagtacaagaacactagtggctccggcgagggcagaggaagtctactaacctgcggagatgtggaagaaaatcctggcccaatggtgagcaagggcgaggagctgttcaccggggtggtgcccatcctggtcgagctggacggcgacgtaaacggccacaagttcagcgtgtccggcgagggcgagggcgatgccacctacggcaagctgaccctgaagttcatctgcaccaccggcaagctgcccgtgccctggcccaccctcgtgaccaccctgacctacggcgtgcagtgcttcagccgctaccccgaccacatgaagcagcacgacttcttcaagtccgccatgcccgaaggctacgtccaggagcgcaccatcttcttcaaggacgacggcaactacaagacccgcgccgaggtgaagttcgagggcgacaccctggtgaaccgcatcgagctgaagggcatcgacttcaaggaggacggcaacatcctggggcacaagctggagtacaactacaacagccacaacgtctatatcatggccgacaagcagaagaacggcatcaaggtgaacttcaagatccgccacaacatcgaggacggcagcgtgcagctcgccgaccactaccagcagaacacccccatcggcgacggccccgtgctgctgcccgacaaccactacctgagcacccagtccgccctgagcaaagaccccaacgagaagcgcgatcacatggtcctgctggagttcgtgaccgccgccgggatcactctcggcatggacgagctgtacaagtaa

SEQ ID NO: 22303 - DNA, 2616 bp, Artificial Sequence
  Synthetic Polynucleotide
atggccttaccagtgaccgccttgctcctgccgctggccttgctgctccacgccgccaggccggcatgcgaggtgcagctggttgaatctggtggcggagttgtgcagcctggcagaagcctgagactgtcttgtgccgccagcggctttagcttcagcggctatggaatgcactgggtccgacaggcccctggcaaaggacttgagtgggtcgcctacatcagctacgacggcagcaacaagtattacgccgacagcgtgaagggcagattcaccatcagccgggacaacagcaagaacaccctgtacctccagatgaacagcctgagagccgaggacaccgccgtgtactactgcgccaaagatcctgcctggggactgagactgggcgagagcagcagctacgatttcgactactggggccagggcacaatggtcacagtttctagcggtaccacgcgtatggaccctgatctcgaaattgaggccgcctttctggaacgcgagaacactgccctggaaaccagggtcgcagagctgagacagagagtgcagagactgcggaacagagtgtctcagtaccgcaccagatatggcccactcggcggaggtaaactcgagagagcaaagcgaagtggtagcggagcaaccaacttttctctgctcaagcaagccggtgacgtggaagagaaccctggtcctgaattcatgaccacctccgcctcctcccacctaaacaagggcatcaagcaggtctacatgtccctcccccagggcgagaaggtccaggccatgtacatctggatcgacggcaccggcgagggcctccgctgcaagacccgcaccctcgactccgagcccaagtgcgtcgaggagctccccgagtggaacttcgacggctcctccaccctccagtccgagggctccaactccgacatgtacctcgtccccgccgccatgttccgcgaccccttccgcaaggaccccaacaagctcgtcctctgcgaggtcttcaagtacaaccgccgccccgccgagaccaacctccgccacacctgcaagcgcatcatggacatggtctccaaccagcacccctggttcggcatggagcaggagtacaccctcatgggcaccgacggccaccccttcggctggccctccaacggcttccccggcccccagggcccctactactgcggcgtcggcgccgaccgcgcctacggcagagatattgtggaagcccactaccgggcctgtctgtatgccggcgtgaagatcgccggcaccaatgccgaagttatgcccgctcagtgggagttccagatcggcccttgtgaaggcatcagcatgggcgatcatctgtgggtcgcccgcttcattctgcaccgcgtgtgcgaggatttcggcgtgatcgccaccttcgatcccaagcctattccaggcaactggaatggtgccggatgccacaccaacttcagcaccaaggccatgcgcgaggaaaacggcctgaagtacatcgaggaagccatcgagaagctgagcaagcgccaccagtaccacatccgcgcctacgatccaaaaggcggcctggataatgcccgccgtctgaccggattccacgaaaccagcaacatcaacgatttcagtgccggcgtcgccaatcgcagtgccagcattcgtattccccgcaccgtgggccaagagaagaagggctactttgaggatcgccgtccgagcgccaactgcgatccttttagtgtgacagaggccctgatccgcacatgcctgctgaatgagacaggcgacgagcccttccagtacaagaacactagtggctccggcgagggcagaggaagtctactaacctgcggagatgtggaagaaaatcctggcccaatggtgagcaagggcgaggagctgttcaccggggtggtgcccatcctggtcgagctggacggcgacgtaaacggccacaagttcagcgtgtccggcgagggcgagggcgatgccacctacggcaagctgaccctgaagttcatctgcaccaccggcaagctgcccgtgccctggcccaccctcgtgaccaccctgacctacggcgtgcagtgcttcagccgctaccccgaccacatgaagcagcacgacttcttcaagtccgccatgcccgaaggctacgtccaggagcgcaccatcttcttcaaggacgacggcaactacaagacccgcgccgaggtgaagttcgagggcgacaccctggtgaaccgcatcgagctgaagggcatcgacttcaaggaggacggcaacatcctggggcacaagctggagtacaactacaacagccacaacgtctatatcatggccgacaagcagaagaacggcatcaaggtgaacttcaagatccgccacaacatcgaggacggcagcgtgcagctcgccgaccactaccagcagaacacccccatcggcgacggccccgtgctgctgcccgacaaccactacctgagcacccagtccgccctgagcaaagaccccaacgagaagcgcgatcacatggtcctgctggagttcgtgaccgccgccgggatcactctcggcatggacgagctgtacaagtaa

SEQ ID NO: 22304 - DNA, 2577 bp, Artificial Sequence
  Synthetic Polynucleotide
atggccttaccagtgaccgccttgctcctgccgctggccttgctgctccacgccgccaggccgcaggtgcagctggttgaatctggcggaggactggttcagcctggcggatctctgagactgtcttgtgccgccagcggcttcaccttcaccaatcacgccatgagctgggtccgacaggcccctggaaaaggactggaactggtgtctagcatcagcggcaacggcagaaccacctactacgccgatagcgtgaagggcagattcaccatcagccgggacatcagcaagaacaccctggacctccagatgaacagcctgagagccgaggataccgccgtgtactactgtgccaaggatggcggagagacactggtggatagcagaggccagggcacactggtcacagtgtcatctacgcgtatggaccctgatctcgaaattgaggccgcctttctggaacgcgagaacactgccctggaaaccagggtcgcagagctgagacagagagtgcagagactgcggaacagagtgtctcagtaccgcaccagatatggcccactcggcggaggtaaactcgagagagcaaagcgaagtggtagcggagcaaccaacttttctctgctcaagcaagccggtgacgtggaagagaaccctggtcctgaattcatgaccacctccgcctcctcccacctaaacaagggcatcaagcaggtctacatgtccctcccccagggcgagaaggtccaggccatgtacatctggatcgacggcaccggcgagggcctccgctgcaagacccgcaccctcgactccgagcccaagtgcgtcgaggagctccccgagtggaacttcgacggctcctccaccctccagtccgagggctccaactccgacatgtacctcgtccccgccgccatgttccgcgaccccttccgcaaggaccccaacaagctcgtcctctgcgaggtcttcaagtacaaccgccgccccgccgagaccaacctccgccacacctgcaagcgcatcatggacatggtctccaaccagcacccctggttcggcatggagcaggagtacaccctcatgggcaccgacggccaccccttcggctggccctccaacggcttccccggcccccagggcccctactactgcggcgtcggcgccgaccgcgcctacggcagagatattgtggaagcccactaccgggcctgtctgtatgccggcgtgaagatcgccggcaccaatgccgaagttatgcccgctcagtgggagttccagatcggcccttgtgaaggcatcagcatgggcgatcatctgtgggtcgcccgcttcattctgcaccgcgtgtgcgaggatttcggcgtgatcgccaccttcgatcccaagcctattccaggcaactggaatggtgccggatgccacaccaacttcagcaccaaggccatgcgcgaggaaaacggcctgaagtacatcgaggaagccatcgagaagctgagcaagcgccaccagtaccacatccgcgcctacgatccaaaaggcggcctggataatgcccgccgtctgaccggattccacgaaaccagcaacatcaacgatttcagtgccggcgtcgccaatcgcagtgccagcattcgtattccccgcaccgtgggccaagagaagaagggctactttgaggatcgccgtccgagcgccaactgcgatccttttagtgtgacagaggccctgatccgcacatgcctgctgaatgagacaggcgacgagcccttccagtacaagaacactagtggctccggcgagggcagaggaagtctactaacctgcggagatgtggaagaaaatcctggcccaatggtgagcaagggcgaggagctgttcaccggggtggtgcccatcctggtcgagctggacggcgacgtaaacggccacaagttcagcgtgtccggcgagggcgagggcgatgccacctacggcaagctgaccctgaagttcatctgcaccaccggcaagctgcccgtgccctggcccaccctcgtgaccaccctgacctacggcgtgcagtgcttcagccgctaccccgaccacatgaagcagcacgacttcttcaagtccgccatgcccgaaggctacgtccaggagcgcaccatcttcttcaaggacgacggcaactacaagacccgcgccgaggtgaagttcgagggcgacaccctggtgaaccgcatcgagctgaagggcatcgacttcaaggaggacggcaacatcctggggcacaagctggagtacaactacaacagccacaacgtctatatcatggccgacaagcagaagaacggcatcaaggtgaacttcaagatccgccacaacatcgaggacggcagcgtgcagctcgccgaccactaccagcagaacacccccatcggcgacggccccgtgctgctgcccgacaaccactacctgagcacccagtccgccctgagcaaagaccccaacgagaagcgcgatcacatggtcctgctggagttcgtgaccgccgccgggatcactctcggcatggacgagctgtacaagtaa

SEQ ID NO: 22305 - DNA, 2805 bp, Artificial Sequence
  Synthetic Polynucleotide
atggccttaccagtgaccgccttgctcctgccgctggccttgctgctccacgccgccaggccggcatgcgatgaaggtggcggcggatctatgggatcttggagcgagttctgggtccgactgggagccatcagagaaagactggatgccctcggaggaagcgaagccgaactggccgccttcgagaaagagatcgccgcctttgagagcgagctgcaagcctacaaaggcaagggcaaccccgaggtggaaaagctgagatacaccgccgctaccatccggcggtttctccaggcttacagacacaatggtaccggcggaggcggatcaggcggcggaggtagcggtggcggtggttctggactggaaaagtgcttccagaccgagaatcccctggaatgccaggacaagggcgaagaggaactccagaagtacatccaagagtctcaggccctggctaagagaagctgcggcctgtttcagaagctgggcgagtattacctccagaacgccttcctggtggcctacaccaagaaagcccctcagctgacaagcagcgagctgatggctatcacccggaagatggccgccacagccgctacatgttgtcagctcagcgaggacaaactgctggcctgtggcgaaggcgctgccgacatcattatcggccacctgtgcatccggcacgaaatgacccctgtgaatcctggcgtgggccagtgttgtacaagcagctacgccaacagacggccctgctttagcagcctggtggtggacgaaacctacgtgccaccagccttcagcgacgacaagttcatcttccacaaggacctgtgtcaggcccagggcgttgccctccagacaatgaagcaagagttcctgattaacctggtcaagcagaagccccagatcaccgaggaacagctggaagccgtgatcgccgatttcagcggcctgctggaaaaatgctgtcagggccaagagcaagaagtgtgcttcgccgaggaaggccagaagctgatctccaagacaagagccgctctcggcgttggaggcggaggttctggtggtggtggaagcggaggtggtggtagtgggcccatgggcagctgggatgagttcggcagaaggctgtacgccattgagtggcggctgtatgcccttggcggatctgaagctgagctggccgcttttgaaaaagaaattgccgctttcgagtccgagcttcaggcttacaaaggcaaagggaatcctgaggtcgagaaactgcgggaaatcgccgccgtgatccggtccaatctccaggcatatcggcataatggatccggtggtggcggtagtggtggcggaggaagtggcggcggaggatctcaccaccatcaccatcatcatcaccaccatacgcgtggaggcagtggtgtcttcacactcgaagatttcgttggggactggcgacagacagccggctacaacctggaccaagtccttgaacagggaggtgtgtccagtttgtttcagaatctcggggtgtccgtaactccgatccaaaggattgtcctgagcggtgaaaatgggctgaagatcgacatccatgtcatcatcccgtatgaaggtctgagcggcgaccaaatgggccagatcgaaaaaatttttaaggtggtgtaccctgtggatgatcatcactttaaggtgatcctgcactatggcacactggtaatcgacggggttacgccgaacatgatcgactatttcggacggccctatgaaggcatcgccgtgttcgacggcaaaaagatcactgtaacagggaccctgtggaacggcaacaaaattatcgacgagcgcctgatcaaccccgacggctccctgctgttccgagtaaccatcaacggagtgaccggctggcggctgtgcgaacgcattctggcgctcgagggaggcagctggagccaccctcagtttgaaaaagactacaaagacgatgacgataagggatcagattacaaggatgatgatgacaaggggtcagattataaagacgacgatgataaagggagcgactacaaggacgacgatgacaaggcctggtcccatccccagttcgagaaacaccatcaccaccaccatcatcacactagtggctccggcgagggcagaggaagtctactaacctgcggagatgtggaagaaaatcctggcccacatatgaccgagtacaagcccacggtgcgcctcgccacccgcgacgacgtccccagggccgtacgcaccctcgccgccgcgttcgccgactaccccgccacgcgccacaccgtcgatccggaccgccacatcgagcgggtcaccgagctgcaagaactcttcctcacgcgcgtcgggctcgacatcggcaaggtgtgggtcgcggacgacggcgccgcggtggcggtctggaccacgccggagagcgtcgaagcgggggcggtgttcgccgagatcggcccgcgcatggccgagttgagcggttcccggctggccgcgcagcaacagatggaaggcctcctggcgccgcaccggcccaaggagcccgcgtggttcctggccaccgtcggcgtctcgcccgaccaccagggcaagggtctgggcagcgccgtcgtgctccccggagtggaggcggccgagcgcgccggggtgcccgccttcctggagacctccgcgccccgcaacctccccttctacgagcggctcggcttcaccgtcaccgccgacgtcgaggtgcccgaaggaccgcgcacctggtgcatgacccgcaagcccggtgcctga

SEQ ID NO: 22306 - DNA, 27 bp, Artificial Sequence
  Synthetic Polynucleotide
ggggggggggggggggggggggggggg

SEQ ID NO: 22307 - DNA, 3342 bp, Artificial Sequence
  Synthetic Polynucleotide
atggccttaccagtgaccgccttgctcctgccgctggccttgctgctccacgccgccaggccggcatgcgagtgggtcaagttcgccaagccttgcagagaaggcgaggacaacagcaagcggaaccctatcgccaagatcaccagcgactaccaggccacacagaagatcacctaccggatctctggcgtgggcatcgaccagcctccattcggcatcttcgtggtggacaagaacaccggcgacatcaacatcaccgccatcgtggacagagaggaaacccctagcttcctgattacctgtagagccctgaacgcccagggcctcgatgtggaaaagcctctgatcctgaccgtgaagatcctggacatcaacgacaaccctccagtgttcagccagcagattttcatgggcgagatcgaggaaaacagcgccagcaacagcctggtcatgatcctgaatgccaccgacgccgacgagcccaaccacctgaatagcaagatcgccttcaagatcgtgtcccaagagcctgccggcacacccatgtttctgctgtccagaaataccggcgaagtgcggaccctgaccaatagcctggatagagagcaggccagcagctacagactggtggtgtctggcgctgacaaggatggcgagggactgagcacccagtgcgagtgcaacatcaaagtgaaggacgtgaacgacaacttccccatgttccgggacagcctcgagggacagcctaaggccaatcctaccgtgacactgttccctccaagcagcgaagaactccaggccaacaaggccacacttgtgtgcctgatctccgacttctaccctggggctgtgacagtggcttggaaggccgatggatctcctgtgaaagccggcgtggaaaccaccaagccatccaagcagagcaacaacaaatacgccgccagctcctacctgagcctgacacctgagcagtggaagtcccacagatcctacagctgccaagtgacccacgaaggcagcaccgtggaaaagacagtggcccctacagagtgcagcggcagagccgattgcggctttaccagcgagagctaccagcagggcgtgctgagcgccaccatcctgtacgagatcctgctgggcaaggccaccctgtacgccgtgctggtgtctgccctggtgctgatggctatggtcaagcggaaggacagccggggaagggccaagcgatctggatctggagcaacaaacttctcactactcaaacaagcaggtgacgtggaggagaatcccgggcctactagtgccaccatggactggatttggcgcatccttttccttgtcggcgctgctaccggcgcccattccgggccccaggttcagctgcaagagtctggcggaggacttgctcaagctggcggaagcctgagactgtcttgtgccgcctctggcagaaccttcagcatgggctggtttagacaggcccctggcaaagagagagagttcgtcgccgccatcacatacagcggcggcagcccttactacgcctcttctgtcagaggccggttcaccatcagccgggacaacgccaagaacaccgtgtacctccagatgaacagcctgaagccagaggacaccgccgtgtactactgtgccgccaatccaacctacggcagcgactggaatgccgagaattggggccagggcacccaagtgacagtgtctagtggatccggcggcggaggatctggcggaggcggatctgggggcggaggctctttcgaacaagttcagcttcaacagcctggcgctgagctggtcaaacctggcgcttctgtgaagatgagctgcaaagccagcggctacgccttcagcagctactggatcaactggatgaagcagaaacccggccagggactcgaatggatcggccaaatctatcccggcgacggcgacaccaactacaacggcaagttcaagggcagagccacactgaccgccgatacctctagcagcacagcctacatgcagctgagcagcctgaccagcgaagatagcgccgtgtacttctgtgcccggtccatcacaacagtcgtgggctgcgctatggactattggggccagggaacaagcgtgaccgtgtctagtacgcgtgcctctacaaagggaccctccgtgtttcctctggctcccagcagcaagtctacaagcggaggaacagccgctctgggctgcctggtcaaggattactttcccgagcctgtgaccgtgtcctggaatagcggagcactgacaagcggcgtgcacacctttccagccgtgctgcaaagcagcggcctgtactctctgagcagcgtggtcacagtgcctagctctagcctgggcacccagacctacatctgcaatgtgaaccacaagcctagcaacaccaaggtggacaagagagtggaacccaagagctgtatccccgaggacacattcttcccaagccccgagagcagctgcgacgtgaagctggtggaaaagagcttcgagacagacaccaacctgaacttccagaacctgagcgtgatcggcttcagaatcctgctgctgaaagtggccggctttaacctgctgatgaccctgcggctgtggtccagccgcgccaagagaagcggatctggcgtgaagcagaccctgaatttcgacctgctgaagctggctggcgacgtggaatccaacccaggcccttctagaggccatatgaccgagtacaagcccacggtgcgcctcgccacccgcgacgacgtccccagggccgtacgcaccctcgccgccgcgttcgccgactaccccgccacgcgccacaccgtcgatccggaccgccacatcgagcgggtcaccgagctgcaagaactcttcctcacgcgcgtcgggctcgacatcggcaaggtgtgggtcgcggacgacggcgccgcggtggcggtctggaccacgccggagagcgtcgaagcgggggcggtgttcgccgagatcggcccgcgcatggccgagttgagcggttcccggctggccgcgcagcaacagatggaaggcctcctggcgccgcaccggcccaaggagcccgcgtggttcctggccaccgtcggcgtctcgcccgaccaccagggcaagggtctgggcagcgccgtcgtgctccccggagtggaggcggccgagcgcgccggggtgcccgccttcctggagacctccgcgccccgcaacctccccttctacgagcggctcggcttcaccgtcaccgccgacgtcgaggtgcccgaaggaccgcgcacctggtgcatgacccgcaagcccggtgcctga

SEQ ID NO: 22308 - DNA, 4029 bp, Artificial Sequence
  Synthetic Polynucleotide
atggccttaccagtgaccgccttgctcctgccgctggccttgctgctccacgccgccaggccggcatgcgagtgggtcaagttcgccaagccttgcagagaaggcgaggacaacagcaagcggaaccctatcgccaagatcaccagcgactaccaggccacacagaagatcacctaccggatctctggcgtgggcatcgaccagcctccattcggcatcttcgtggtggacaagaacaccggcgacatcaacatcaccgccatcgtggacagagaggaaacccctagcttcctgattacctgtagagccctgaacgcccagggcctcgatgtggaaaagcctctgatcctgaccgtgaagatcctggacatcaacgacaaccctccagtgttcagccagcagattttcatgggcgagatcgaggaaaacagcgccagcaacagcctggtcatgatcctgaatgccaccgacgccgacgagcccaaccacctgaatagcaagatcgccttcaagatcgtgtcccaagagcctgccggcacacccatgtttctgctgtccagaaataccggcgaagtgcggaccctgaccaatagcctggatagagagcaggccagcagctacagactggtggtgtctggcgctgacaaggatggcgagggactgagcacccagtgcgagtgcaacatcaaagtgaaggacgtgaacgacaacttccccatgttccgggacagccagtatagcgcccggatcgaagagaacatcctgagcagcgagctgctgcggttccaagtgaccgacctggacgaagagtacaccgacaactggctggccgtgtacttcttcaccagcggcaacgaaggcaactggttcgagatccagacagaccccaggaccaacgagggcatcctgaaggttgtgaaggccctggactacgagcagctccagagcgtgaagctgtctatcgccgtgaagaacaaggccgagttccaccagtccgtgatctcccggtacagagtgcagagcacccctgtgaccatccaagtgattaacgtgcgcgagggcattgccttcagacccgccagcaagaccttcaccgtgcagaagggcatcagcagcaagaaactggtggactacatcctgggcacctatcaggccatcgacgaggacacaaacaaagccgcctccaacgtgaaatacgtgatgggcagaaacgacggcggctacctgatgatcgactccaagaccgccgagatcaagttcgtgaagaatatgaaccgggactccaccttcatcgtgaacaagaccatcacagccgaggtgctggctatcgacgagtataccggcaagaccagcaccggcacagtgtatgtgcgggtgcccgacttcaacgataactgccctacagccgtgctggaaaagctcgagggacagcctaaggccaatcctaccgtgacactgttccctccaagcagcgaagaactccaggccaacaaggccacacttgtgtgcctgatctccgacttctaccctggggctgtgacagtggcttggaaggccgatggatctcctgtgaaagccggcgtggaaaccaccaagccatccaagcagagcaacaacaaatacgccgccagctcctacctgagcctgacacctgagcagtggaagtcccacagatcctacagctgccaagtgacccacgaaggcagcaccgtggaaaagacagtggcccctacagagtgcagcggcagagccgattgcggctttaccagcgagagctaccagcagggcgtgctgagcgccaccatcctgtacgagatcctgctgggcaaggccaccctgtacgccgtgctggtgtctgccctggtgctgatggctatggtcaagcggaaggacagccggggaagggccaagcgatctggatctggagcaacaaacttctcactactcaaacaagcaggtgacgtggaggagaatcccgggcctactagtgccaccatggactggatttggcgcatccttttccttgtcggcgctgctaccggcgcccattccgggccccaggttcagctgcaagagtctggcggaggacttgctcaagctggcggaagcctgagactgtcttgtgccgcctctggcagaaccttcagcatgggctggtttagacaggcccctggcaaagagagagagttcgtcgccgccatcacatacagcggcggcagcccttactacgcctcttctgtcagaggccggttcaccatcagccgggacaacgccaagaacaccgtgtacctccagatgaacagcctgaagccagaggacaccgccgtgtactactgtgccgccaatccaacctacggcagcgactggaatgccgagaattggggccagggcacccaagtgacagtgtctagtggatccggcggcggaggatctggcggaggcggatctgggggcggaggctctttcgaacaagttcagcttcaacagcctggcgctgagctggtcaaacctggcgcttctgtgaagatgagctgcaaagccagcggctacgccttcagcagctactggatcaactggatgaagcagaaacccggccagggactcgaatggatcggccaaatctatcccggcgacggcgacaccaactacaacggcaagttcaagggcagagccacactgaccgccgatacctctagcagcacagcctacatgcagctgagcagcctgaccagcgaagatagcgccgtgtacttctgtgcccggtccatcacaacagtcgtgggctgcgctatggactattggggccagggaacaagcgtgaccgtgtctagtacgcgtgcctctacaaagggaccctccgtgtttcctctggctcccagcagcaagtctacaagcggaggaacagccgctctgggctgcctggtcaaggattactttcccgagcctgtgaccgtgtcctggaatagcggagcactgacaagcggcgtgcacacctttccagccgtgctgcaaagcagcggcctgtactctctgagcagcgtggtcacagtgcctagctctagcctgggcacccagacctacatctgcaatgtgaaccacaagcctagcaacaccaaggtggacaagagagtggaacccaagagctgtatccccgaggacacattcttcccaagccccgagagcagctgcgacgtgaagctggtggaaaagagcttcgagacagacaccaacctgaacttccagaacctgagcgtgatcggcttcagaatcctgctgctgaaagtggccggctttaacctgctgatgaccctgcggctgtggtccagccgcgccaagagaagcggatctggcgtgaagcagaccctgaatttcgacctgctgaagctggctggcgacgtggaatccaacccaggcccttctagaggccatatgaccgagtacaagcccacggtgcgcctcgccacccgcgacgacgtccccagggccgtacgcaccctcgccgccgcgttcgccgactaccccgccacgcgccacaccgtcgatccggaccgccacatcgagcgggtcaccgagctgcaagaactcttcctcacgcgcgtcgggctcgacatcggcaaggtgtgggtcgcggacgacggcgccgcggtggcggtctggaccacgccggagagcgtcgaagcgggggcggtgttcgccgagatcggcccgcgcatggccgagttgagcggttcccggctggccgcgcagcaacagatggaaggcctcctggcgccgcaccggcccaaggagcccgcgtggttcctggccaccgtcggcgtctcgcccgaccaccagggcaagggtctgggcagcgccgtcgtgctccccggagtggaggcggccgagcgcgccggggtgcccgccttcctggagacctccgcgccccgcaacctccccttctacgagcggctcggcttcaccgtcaccgccgacgtcgaggtgcccgaaggaccgcgcacctggtgcatgacccgcaagcccggtgcctga

SEQ ID NO: 22309 - DNA, 3672 bp, Artificial Sequence
  Synthetic Polynucleotide
atggccttaccagtgaccgccttgctcctgccgctggccttgctgctccacgccgccaggccggcatgcgagtgggtcaagttcgccaagccttgcagagaaggcgaggacaacagcaagcggaaccctatcgccaagatcaccagcgactaccaggccacacagaagatcacctaccggatctctggcgtgggcatcgaccagcctccattcggcatcttcgtggtggacaagaacaccggcgacatcaacatcaccgccatcgtggacagagaggaaacccctagcttcctgattacctgtagagccctgaacgcccagggcctcgatgtggaaaagcctctgatcctgaccgtgaagatcctggacatcaacgacaaccctccagtgttcagccagcagattttcatgggcgagatcgaggaaaacagcgccagcaacagcctggtcatgatcctgaatgccaccgacgccgacgagcccaaccacctgaatagcaagatcgccttcaagatcgtgtcccaagagcctgccggcacacccatgtttctgctgtccagaaataccggcgaagtgcggaccctgaccaatagcctggatagagagcaggccagcagctacagactggtggtgtctggcgctgacaaggatggcgagggactgagcacccagtgcgagtgcaacatcaaagtgaaggacgtgaacgacaacttccccatgttccgggacagcctcgagggacagcctaaggccaatcctaccgtgacactgttccctccaagcagcgaagaactccaggccaacaaggccacacttgtgtgcctgatctccgacttctaccctggggctgtgacagtggcttggaaggccgatggatctcctgtgaaagccggcgtggaaaccaccaagccatccaagcagagcaacaacaaatacgccgccagctcctacctgagcctgacacctgagcagtggaagtcccacagatcctacagctgccaagtgacccacgaaggcagcaccgtggaaaagacagtggcccctacagagtgcagcggcagagccgattgcggctttaccagcgagagctaccagcagggcgtgctgagcgccaccatcctgtacgagatcctgctgggcaaggccaccctgtacgccgtgctggtgtctgccctggtgctgatggctatggtcaagcggaaggacagccggggaagggccaagcgatctggatctggagcaacaaacttctcactactcaaacaagcaggtgacgtggaggagaatcccgggcctactagtgccaccatggactggatttggcgcatccttttccttgtcggcgctgctaccggcgcccattccgggccccaggttcagctgcaagagtctggcggaggacttgctcaagctggcggaagcctgagactgtcttgtgccgcctctggcagaaccttcagcatgggctggtttagacaggcccctggcaaagagagagagttcgtcgccgccatcacatacagcggcggcagcccttactacgcctcttctgtcagaggccggttcaccatcagccgggacaacgccaagaacaccgtgtacctccagatgaacagcctgaagccagaggacaccgccgtgtactactgtgccgccaatccaacctacggcagcgactggaatgccgagaattggggccagggcacccaagtgacagtgtctagtggatccggcggcggaggatctggcggaggcggatctgggggcggaggctctttcgaagacagccagtatagcgcccggatcgaagagaacatcctgagcagcgagctgctgcggttccaagtgaccgacctggacgaagagtacaccgacaactggctggccgtgtacttcttcaccagcggcaacgaaggcaactggttcgagatccagacagaccccaggaccaacgagggcatcctgaaggttgtgaaggccctggactacgagcagctccagagcgtgaagctgtctatcgccgtgaagaacaaggccgagttccaccagtccgtgatctcccggtacagagtgcagagcacccctgtgaccatccaagtgattaacgtgcgcgagggcattgccttcagacccgccagcaagaccttcaccgtgcagaagggcatcagcagcaagaaactggtggactacatcctgggcacctatcaggccatcgacgaggacacaaacaaagccgcctccaacgtgaaatacgtgatgggcagaaacgacggcggctacctgatgatcgactccaagaccgccgagatcaagttcgtgaagaatatgaaccgggactccaccttcatcgtgaacaagaccatcacagccgaggtgctggctatcgacgagtataccggcaagaccagcaccggcacagtgtatgtgcgggtgcccgacttcaacgataactgccctacagccgtgctggaaaagacgcgtgcctctacaaagggaccctccgtgtttcctctggctcccagcagcaagtctacaagcggaggaacagccgctctgggctgcctggtcaaggattactttcccgagcctgtgaccgtgtcctggaatagcggagcactgacaagcggcgtgcacacctttccagccgtgctgcaaagcagcggcctgtactctctgagcagcgtggtcacagtgcctagctctagcctgggcacccagacctacatctgcaatgtgaaccacaagcctagcaacaccaaggtggacaagagagtggaacccaagagctgtatccccgaggacacattcttcccaagccccgagagcagctgcgacgtgaagctggtggaaaagagcttcgagacagacaccaacctgaacttccagaacctgagcgtgatcggcttcagaatcctgctgctgaaagtggccggctttaacctgctgatgaccctgcggctgtggtccagccgcgccaagagaagcggatctggcgtgaagcagaccctgaatttcgacctgctgaagctggctggcgacgtggaatccaacccaggcccttctagaggccatatgaccgagtacaagcccacggtgcgcctcgccacccgcgacgacgtccccagggccgtacgcaccctcgccgccgcgttcgccgactaccccgccacgcgccacaccgtcgatccggaccgccacatcgagcgggtcaccgagctgcaagaactcttcctcacgcgcgtcgggctcgacatcggcaaggtgtgggtcgcggacgacggcgccgcggtggcggtctggaccacgccggagagcgtcgaagcgggggcggtgttcgccgagatcggcccgcgcatggccgagttgagcggttcccggctggccgcgcagcaacagatggaaggcctcctggcgccgcaccggcccaaggagcccgcgtggttcctggccaccgtcggcgtctcgcccgaccaccagggcaagggtctgggcagcgccgtcgtgctccccggagtggaggcggccgagcgcgccggggtgcccgccttcctggagacctccgcgccccgcaacctccccttctacgagcggctcggcttcaccgtcaccgccgacgtcgaggtgcccgaaggaccgcgcacctggtgcatgacccgcaagcccggtgcctga

SEQ ID NO: 22310 - DNA, 3261 bp, Artificial Sequence
  Synthetic Polynucleotide
atggccttaccagtgaccgccttgctcctgccgctggccttgctgctccacgccgccaggccggcatgcgagtgggtcaagttcgccaagccttgcagagaaggcgaggacaacagcaagcggaaccctatcgccaagatcaccagcgactaccaggccacacagaagatcacctaccggatctctggcgtgggcatcgaccagcctccattcggcatcttcgtggtggacaagaacaccggcgacatcaacatcaccgccatcgtggacagagaggaaacccctagcttcctgattacctgtagagccctgaacgcccagggcctcgatgtggaaaagcctctgatcctgaccgtgaagatcctggacatcaacgacaaccctccagtgttcagccagcagattttcatgggcgagatcgaggaaaacagcgccagcaacagcctggtcatgatcctgaatgccaccgacgccgacgagcccaaccacctgaatagcaagatcgccttcaagatcgtgtcccaagagcctgccggcacacccatgtttctgctgtccagaaataccggcgaagtgcggaccctgaccaatagcctggatagagagcaggccagcagctacagactggtggtgtctggcgctgacaaggatggcgagggactgagcacccagtgcgagtgcaacatcaaagtgaaggacgtgaacgacaacttccccatgttccgggacagcctcgagggacagcctaaggccaatcctaccgtgacactgttccctccaagcagcgaagaactccaggccaacaaggccacacttgtgtgcctgatctccgacttctaccctggggctgtgacagtggcttggaaggccgatggatctcctgtgaaagccggcgtggaaaccaccaagccatccaagcagagcaacaacaaatacgccgccagctcctacctgagcctgacacctgagcagtggaagtcccacagatcctacagctgccaagtgacccacgaaggcagcaccgtggaaaagacagtggcccctacagagtgcagcggcagagccgattgcggctttaccagcgagagctaccagcagggcgtgctgagcgccaccatcctgtacgagatcctgctgggcaaggccaccctgtacgccgtgctggtgtctgccctggtgctgatggctatggtcaagcggaaggacagccggggaagggccaagcgatctggatctggagcaacaaacttctcactactcaaacaagcaggtgacgtggaggagaatcccgggcctactagtgccaccatggactggatttggcgcatccttttccttgtcggcgctgctaccggcgcccattccttcgaagacagccagtatagcgcccggatcgaagagaacatcctgagcagcgagctgctgcggttccaagtgaccgacctggacgaagagtacaccgacaactggctggccgtgtacttcttcaccagcggcaacgaaggcaactggttcgagatccagacagaccccaggaccaacgagggcatcctgaaggttgtgaaggccctggactacgagcagctccagagcgtgaagctgtctatcgccgtgaagaacaaggccgagttccaccagtccgtgatctcccggtacagagtgcagagcacccctgtgaccatccaagtgattaacgtgcgcgagggcattgccttcagacccgccagcaagaccttcaccgtgcagaagggcatcagcagcaagaaactggtggactacatcctgggcacctatcaggccatcgacgaggacacaaacaaagccgcctccaacgtgaaatacgtgatgggcagaaacgacggcggctacctgatgatcgactccaagaccgccgagatcaagttcgtgaagaatatgaaccgggactccaccttcatcgtgaacaagaccatcacagccgaggtgctggctatcgacgagtataccggcaagaccagcaccggcacagtgtatgtgcgggtgcccgacttcaacgataactgccctacagccgtgctggaaaagacgcgtgcctctacaaagggaccctccgtgtttcctctggctcccagcagcaagtctacaagcggaggaacagccgctctgggctgcctggtcaaggattactttcccgagcctgtgaccgtgtcctggaatagcggagcactgacaagcggcgtgcacacctttccagccgtgctgcaaagcagcggcctgtactctctgagcagcgtggtcacagtgcctagctctagcctgggcacccagacctacatctgcaatgtgaaccacaagcctagcaacaccaaggtggacaagagagtggaacccaagagctgtatccccgaggacacattcttcccaagccccgagagcagctgcgacgtgaagctggtggaaaagagcttcgagacagacaccaacctgaacttccagaacctgagcgtgatcggcttcagaatcctgctgctgaaagtggccggctttaacctgctgatgaccctgcggctgtggtccagccgcgccaagagaagcggatctggcgtgaagcagaccctgaatttcgacctgctgaagctggctggcgacgtggaatccaacccaggcccttctagaggccatatgaccgagtacaagcccacggtgcgcctcgccacccgcgacgacgtccccagggccgtacgcaccctcgccgccgcgttcgccgactaccccgccacgcgccacaccgtcgatccggaccgccacatcgagcgggtcaccgagctgcaagaactcttcctcacgcgcgtcgggctcgacatcggcaaggtgtgggtcgcggacgacggcgccgcggtggcggtctggaccacgccggagagcgtcgaagcgggggcggtgttcgccgagatcggcccgcgcatggccgagttgagcggttcccggctggccgcgcagcaacagatggaaggcctcctggcgccgcaccggcccaaggagcccgcgtggttcctggccaccgtcggcgtctcgcccgaccaccagggcaagggtctgggcagcgccgtcgtgctccccggagtggaggcggccgagcgcgccggggtgcccgccttcctggagacctccgcgccccgcaacctccccttctacgagcggctcggcttcaccgtcaccgccgacgtcgaggtgcccgaaggaccgcgcacctggtgcatgacccgcaagcccggtgcctga

SEQ ID NO: 22311 - DNA, 4050 bp, Artificial Sequence
  Synthetic Polynucleotide
atggccttaccagtgaccgccttgctcctgccgctggccttgctgctccacgccgccaggccggcatgcgagtgggtcaagttcgccaagccttgcagagaaggcgaggacaacagcaagcggaaccctatcgccaagatcaccagcgactaccaggccacacagaagatcacctaccggatctctggcgtgggcatcgaccagcctccattcggcatcttcgtggtggacaagaacaccggcgacatcaacatcaccgccatcgtggacagagaggaaacccctagcttcctgattacctgtagagccctgaacgcccagggcctcgatgtggaaaagcctctgatcctgaccgtgaagatcctggacatcaacgacaaccctccagtgttcagccagcagattttcatgggcgagatcgaggaaaacagcgccagcaacagcctggtcatgatcctgaatgccaccgacgccgacgagcccaaccacctgaatagcaagatcgccttcaagatcgtgtcccaagagcctgccggcacacccatgtttctgctgtccagaaataccggcgaagtgcggaccctgaccaatagcctggatagagagcaggccagcagctacagactggtggtgtctggcgctgacaaggatggcgagggactgagcacccagtgcgagtgcaacatcaaagtgaaggacgtgaacgacaacttccccatgttccgggacagcggtaccggcggaggcggatctggcggcggaggtagcggtggcggaggatctgaattcgacatccagatgacacagagccctagcagcctgtctgccagcgtgggagacagagtgaccatcacatgcaaggccagcgaccacatcaacaactggctggcctggtatcagcagaagcctggacaggcccctaagctgctgatctacggcgctaccacactggaaacaggcgtgcccagcagattttctggcagcggctctggcaccgactacaccctgacaatatccagcctccagcctgaggacttcgccacctactactgtcagcagagctggaacaccccttggacattcggccagggcaccaagctggaaatcaagagactcgaggacctgaagaacgtgttcccacctgaggtggccgtgttcgagcctagcaaggccgagatcgcccacacccagaaagccaccctcgtgtgcctggctaccggcttctaccccgaccatgtggaactgtcttggtgggtcaacggcaaagaggtgcacagcggcgtgtgtaccgacccccagccactgaaagaacagcccgccctgaacgacagccggtactgcctgagcagcagactgagagtgtccgccaccttctggcagaacccccggaaccacttcagatgccaggtgcagttctacggcctgagcgagaacgacgagtggacccaggacagagccaagcccgtgacccagatcgtgtctgccgaagcctggggcagagccgattgcggcatcaccagcgccagctaccaccagggcgtgctgagcgccaccatcctgtacgagatcctgctgggcaaggccaccctgtacgccgtgctggtgtctgccctggtgctgatggctatggtcaagcggaaggacagccggggaagggccaagcgatctggatctggagcaacaaacttctcactactcaaacaagcaggtgacgtggaggagaatcccgggcctactagtgccaccatggactggatttggcgcatccttttccttgtcggcgctgctaccggcgcccattccgggcccgacagccagtatagcgcccggatcgaagagaacatcctgagcagcgagctgctgcggttccaagtgaccgacctggacgaagagtacaccgacaactggctggccgtgtacttcttcaccagcggcaacgaaggcaactggttcgagatccagacagaccccaggaccaacgagggcatcctgaaggttgtgaaggccctggactacgagcagctccagagcgtgaagctgtctatcgccgtgaagaacaaggccgagttccaccagtccgtgatctcccggtacagagtgcagagcacccctgtgaccatccaagtgattaacgtgcgcgagggcattgccttcagacccgccagcaagaccttcaccgtgcagaagggcatcagcagcaagaaactggtggactacatcctgggcacctatcaggccatcgacgaggacacaaacaaagccgcctccaacgtgaaatacgtgatgggcagaaacgacggcggctacctgatgatcgactccaagaccgccgagatcaagttcgtgaagaatatgaaccgggactccaccttcatcgtgaacaagaccatcacagccgaggtgctggctatcgacgagtataccggcaagaccagcaccggcacagtgtatgtgcgggtgcccgacttcaacgataactgccctacagccgtgctggaaaagggatccggcggcggaggatctggcggaggcggatctgggggcggaggctctttcgaacaagttcagcttcaacagcctggcgctgagctggtcaaacctggcgcttctgtgaagatgagctgcaaagccagcggctacgccttcagcagctactggatcaactggatgaagcagaaacccggccagggactcgaatggatcggccaaatctatcccggcgacggcgacaccaactacaacggcaagttcaagggcagagccacactgaccgccgatacctctagcagcacagcctacatgcagctgagcagcctgaccagcgaagatagcgccgtgtacttctgtgcccggtccatcacaacagtcgtgggctgcgctatggactattggggccagggaacaagcgtgaccgtgtctagtacgcgtatccagaaccctgatcctgccgtgtaccagctgcgggatagcaagagcagcgacaagagcgtgtgtctgttcaccgacttcgacagccagaccaacgtgtcccagagcaaggactccgacgtgtacatcaccgataagtgcgtgctggacatgcggagcatggacttcaagagcaactccgccgtggcctggtccaacaagtccgatttcgcctgcgccaacgccttcaacaacagcattatccccgaggacacattcttcccaagcagcgacgtgccctgcgacgtgaagctggtggaaaagagcttcgagacagacaccaacctgaacttccagaacctgagcgtgatcggcttcagaatcctgctgctgaaagtggccggctttaacctgctgatgaccctgcggctgtggtccagccgcgccaagagaagcggatctggcgtgaagcagaccctgaatttcgacctgctgaagctggctggcgacgtggaatccaacccaggcccttctagaggccatatgaccgagtacaagcccacggtgcgcctcgccacccgcgacgacgtccccagggccgtacgcaccctcgccgccgcgttcgccgactaccccgccacgcgccacaccgtcgatccggaccgccacatcgagcgggtcaccgagctgcaagaactcttcctcacgcgcgtcgggctcgacatcggcaaggtgtgggtcgcggacgacggcgccgcggtggcggtctggaccacgccggagagcgtcgaagcgggggcggtgttcgccgagatcggcccgcgcatggccgagttgagcggttcccggctggccgcgcagcaacagatggaaggcctcctggcgccgcaccggcccaaggagcccgcgtggttcctggccaccgtcggcgtctcgcccgaccaccagggcaagggtctgggcagcgccgtcgtgctccccggagtggaggcggccgagcgcgccggggtgcccgccttcctggagacctccgcgccccgcaacctccccttctacgagcggctcggcttcaccgtcaccgccgacgtcgaggtgcccgaaggaccgcgcacctggtgcatgacccgcaagcccggtgcctga

SEQ ID NO: 22312 - DNA, 4053 bp, Artificial Sequence
  Synthetic Polynucleotide
atggccttaccagtgaccgccttgctcctgccgctggccttgctgctccacgccgccaggccggcatgcgagtgggtcaagttcgccaagccttgcagagaaggcgaggacaacagcaagcggaaccctatcgccaagatcaccagcgactaccaggccacacagaagatcacctaccggatctctggcgtgggcatcgaccagcctccattcggcatcttcgtggtggacaagaacaccggcgacatcaacatcaccgccatcgtggacagagaggaaacccctagcttcctgattacctgtagagccctgaacgcccagggcctcgatgtggaaaagcctctgatcctgaccgtgaagatcctggacatcaacgacaaccctccagtgttcagccagcagattttcatgggcgagatcgaggaaaacagcgccagcaacagcctggtcatgatcctgaatgccaccgacgccgacgagcccaaccacctgaatagcaagatcgccttcaagatcgtgtcccaagagcctgccggcacacccatgtttctgctgtccagaaataccggcgaagtgcggaccctgaccaatagcctggatagagagcaggccagcagctacagactggtggtgtctggcgctgacaaggatggcgagggactgagcacccagtgcgagtgcaacatcaaagtgaaggacgtgaacgacaacttccccatgttccgggacagcggtaccggcggaggcggatctggcggcggaggtagcggtggcggaggatctgaattcgacatccagatgacacagagccctagcagcctgtctgccagcgtgggagacagagtgaccatcacatgcaaggccagcgaccacatcaacaactggctggcctggtatcagcagaagcctggacaggcccctaagctgctgatctacggcgctaccacactggaaacaggcgtgcccagcagattttctggcagcggctctggcaccgactacaccctgacaatatccagcctccagcctgaggacttcgccacctactactgtcagcagagctggaacaccccttggacattcggccagggcaccaagctggaaatcaagagactcgaggccgacgtgtcccccaagcctaccatcttcctgccctctatcgccgagacaaagctccagaaggccggcacctacctgtgcctgctggaaaagttcttcccagatgtgattaagatccactggcaggaaaagaagtccaacaccatcctgggcagccaggaaggcaacaccatgaagaccaacgacacctacatgaagttcagctggctgaccgtgcccgagaagtccctggacaaagaacacagatgcatcgtgcggcacgaaaacaacaagaacggcgtggaccaggaaatcatcttcccacccatcaagaccgatgtgattacaatggaccccaaggacaactgctccaaggacgccaacgataccctgctgctccagctgaccaacaccagcgcctactacatgtacttgttgctgctgctgaagtccgtggtgtacttcgccatcatcacatgctgcctgctgcggagaaccgccttctgctgcaacggcgagaagtctagggccaagcgatctggatctggagcaacaaacttctcactactcaaacaagcaggtgacgtggaggagaatcccgggcctactagtgccaccatggactggatttggcgcatccttttccttgtcggcgctgctaccggcgcccattccgggcccgacagccagtatagcgcccggatcgaagagaacatcctgagcagcgagctgctgcggttccaagtgaccgacctggacgaagagtacaccgacaactggctggccgtgtacttcttcaccagcggcaacgaaggcaactggttcgagatccagacagaccccaggaccaacgagggcatcctgaaggttgtgaaggccctggactacgagcagctccagagcgtgaagctgtctatcgccgtgaagaacaaggccgagttccaccagtccgtgatctcccggtacagagtgcagagcacccctgtgaccatccaagtgattaacgtgcgcgagggcattgccttcagacccgccagcaagaccttcaccgtgcagaagggcatcagcagcaagaaactggtggactacatcctgggcacctatcaggccatcgacgaggacacaaacaaagccgcctccaacgtgaaatacgtgatgggcagaaacgacggcggctacctgatgatcgactccaagaccgccgagatcaagttcgtgaagaatatgaaccgggactccaccttcatcgtgaacaagaccatcacagccgaggtgctggctatcgacgagtataccggcaagaccagcaccggcacagtgtatgtgcgggtgcccgacttcaacgataactgccctacagccgtgctggaaaagggatccggcggcggaggatctggcggaggcggatctgggggcggaggctctttcgaacaagttcagcttcaacagcctggcgctgagctggtcaaacctggcgcttctgtgaagatgagctgcaaagccagcggctacgccttcagcagctactggatcaactggatgaagcagaaacccggccagggactcgaatggatcggccaaatctatcccggcgacggcgacaccaactacaacggcaagttcaagggcagagccacactgaccgccgatacctctagcagcacagcctacatgcagctgagcagcctgaccagcgaagatagcgccgtgtacttctgtgcccggtccatcacaacagtcgtgggctgcgctatggactattggggccagggaacaagcgtgaccgtgtctagtacgcgtcctcacaccaagcccagcgtgttcgtgatgaagaacggcaccaacgtggcctgcctcgtgaaagagttctaccccaaggacatcaggatcaacctggtgtccagcaagaagatcaccgagttcgaccccgccatcgtgatctcccccagcggcaagtacaacgccgtgaagctggggaagtacgaggacagcaacagcgtgacctgctccgtgcagcacgacaacaagaccgtgcacagcaccgactttgaagtgaaaaccgactccaccgaccacgtgaagcccaaagagacagagaacaccaagcagcccagcaagagctgccacaagcccaaggccatcgtgcacaccgagaaagtgaacatgatgagcctgaccgtgctgggcctgcggatgctgttcgccaaaaccgtggccgtgaacttcctgctgaccgccaagctgttcttcctccgcgccaagagaagcggatctggcgtgaagcagaccctgaatttcgacctgctgaagctggctggcgacgtggaatccaacccaggcccttctagaggccatatgaccgagtacaagcccacggtgcgcctcgccacccgcgacgacgtccccagggccgtacgcaccctcgccgccgcgttcgccgactaccccgccacgcgccacaccgtcgatccggaccgccacatcgagcgggtcaccgagctgcaagaactcttcctcacgcgcgtcgggctcgacatcggcaaggtgtgggtcgcggacgacggcgccgcggtggcggtctggaccacgccggagagcgtcgaagcgggggcggtgttcgccgagatcggcccgcgcatggccgagttgagcggttcccggctggccgcgcagcaacagatggaaggcctcctggcgccgcaccggcccaaggagcccgcgtggttcctggccaccgtcggcgtctcgcccgaccaccagggcaagggtctgggcagcgccgtcgtgctccccggagtggaggcggccgagcgcgccggggtgcccgccttcctggagacctccgcgccccgcaacctccccttctacgagcggctcggcttcaccgtcaccgccgacgtcgaggtgcccgaaggaccgcgcacctggtgcatgacccgcaagcccggtgcctga

SEQ ID NO: 22313-22320 - skipped (8 entries)

SEQ ID NO: 22321 - protein, 841 aa, Artificial Sequence
  Synthetic Polypeptide
MALPVTALLLPLALLLHAARPDIQMTQSPSSLSASVGDRVTITCKASQDVGTAVDWYQQKPGKAPKLLIYWASTRHTGVPSRFSGSGSGTDFTLTISSLQPEDFATYYCQQYNSYPLTFGQGTKVEIKRLEDLKNVFPPEVAVFEPSKAEIAHTQKATLVCLATGFYPDHVELSWWVNGKEVHSGVCTDPQPLKEQPALNDSRYCLSSRLRVSATFWQNPRNHFRCQVQFYGLSENDEWTQDRAKPVTQIVSAEAWGRADCGITSASYHQGVLSATILYEILLGKATLYAVLVSALVLMAMVKRKDSRGRAKRSGSGATNFSLLKQAGDVEENPGPTSMDWIWRILFLVGAATGAHSFEEVQLVESGGGLVQPGGSLRLSCAASGYTFTEYTIHWVRQAPGKGLEWVANINPNNGGTTYNQKFEDRFTISRDNSKNTLYLQMNSLRAEDTAVYYCARGWNFDYWGQGTLVTVSSTRIQNPDPAVYQLRDSKSSDKSVCLFTDFDSQTNVSQSKDSDVYITDKCVLDMRSMDFKSNSAVAWSNKSDFACANAFNNSIIPEDTFFPSSDVPCDVKLVEKSFETDTNLNFQNLSVIGFRILLLKVAGFNLLMTLRLWSSRAKRSGSGVKQTLNFDLLKLAGDVESNPGPSRGGIHTMATYEVLCEVARKLGTDDREVVLFLLNVFIPQPTLAQLIGALRALKEEGRLTFPLLAECLFRAGRRDLLRDLLHLDPRFLERHLAGTMSYFSPYQLTVLHVDGELCARDIRSLIFLSKDTIGSRSTPQTFLHWVYCMENLDLLGPTDVDALMSMLRSLSRVDLQRQVQTLMGLHLSGPSHSQHYRHTP

SEQ ID NO: 22322 - protein, 9 aa, Artificial Sequence
  Synthetic Polypeptide
GGGGGGGGG

SEQ ID NO: 22323 - protein, 9 aa, Artificial Sequence
  Synthetic Polypeptide
GGGGGGGGG

SEQ ID NO: 22324 - protein, 9 aa, Artificial Sequence
  Synthetic Polypeptide
GGGGGGGGG

SEQ ID NO: 22325 - protein, 9 aa, Artificial Sequence
  Synthetic Polypeptide
GGGGGGGGG

SEQ ID NO: 22326 - protein, 108 aa, Artificial Sequence
  Synthetic Polypeptide
DIQMTQSPSSLSASVGDRVTITCKASQDVGTAVDWYQQKPGKAPKLLIYWASTRHTGVPSRFSGSGSGTDFTLTISSLQPEDFATYYCQQANSYPLTFGQGTKVEIKR

SEQ ID NO: 22327 - protein, 109 aa, Artificial Sequence
  Synthetic Polypeptide
DIQMTQSPSSLSASVGDRVTITCRASQDVNTAVAWYQQKPGKAPKLLIYSASFLESGVPSRFSGSRSGTDFTLTISSLQPEDFATYYCQQAYTTPPTFGQGTKVEIKRT

SEQ ID NO: 22328 - protein, 108 aa, Artificial Sequence; identical to SEQ ID NO: 10884
  Synthetic Polypeptide

SEQ ID NO: 22329 - protein, 108 aa, Artificial Sequence; identical to SEQ ID NO: 10971
  Synthetic Polypeptide

SEQ ID NO: 22330 - protein, 108 aa, Artificial Sequence; identical to SEQ ID NO: 10972
  Synthetic Polypeptide

SEQ ID NO: 22331 - protein, 108 aa, Artificial Sequence; identical to SEQ ID NO: 10771
  Synthetic Polypeptide

SEQ ID NO: 22332 - protein, 109 aa, Artificial Sequence
  Synthetic Polypeptide
QAVVTQEPSLTVSPGGTVTLTCGSSTGAVTTSNYASWVQEKPDHLFRGLIGGTNNRAPGVPARFSGSLLGGKAALTISGAQPEDEAIYFCVLWYSDHWVFGGGTKLTVD

SEQ ID NO: 22333 - protein, 9 aa, Artificial Sequence
  Synthetic Polypeptide
GGGGGGGGG

SEQ ID NO: 22334 - protein, 9 aa, Artificial Sequence
  Synthetic Polypeptide
GGGGGGGGG

SEQ ID NO: 22335 - protein, 9 aa, Artificial Sequence
  Synthetic Polypeptide
GGGGGGGGG

SEQ ID NO: 22336 - protein, 9 aa, Artificial Sequence
  Synthetic Polypeptide
GGGGGGGGG

SEQ ID NO: 22337 - protein, 9 aa, Artificial Sequence
  Synthetic Polypeptide
GGGGGGGGG

SEQ ID NO: 22338 - protein, 9 aa, Artificial Sequence
  Synthetic Polypeptide
GGGGGGGGG

SEQ ID NO: 22339 - protein, 9 aa, Artificial Sequence
  Synthetic Polypeptide
GGGGGGGGG

SEQ ID NO: 22340 - protein, 115 aa, Artificial Sequence
  Synthetic Polypeptide
EVQLVESGGGLVQPGGSLRLSCAASGFTFTDYTIHWVRQAPGKGLEWVANINPNNGGTTYNQKFEDRFTISRDNSKNTLYLQMNSLRAEDTAVYYCARGWNFDYWGQGTLVTVSS

SEQ ID NO: 22341 - protein, 120 aa, Artificial Sequence
  Synthetic Polypeptide
EVQLVESGGGLVQPGGSLRLSCAASGFNIKDTYIHWVRQAPGKGLEWVARIYPTNGYTRYADSVKGRFTISADTSKNTAYLQMNSLRAEDTAVYYCSRWGGDGFAAMDVWGQGTLVTVSS

SEQ ID NO: 22342 - protein, 117 aa, Artificial Sequence; identical to SEQ ID NO: 11212
  Synthetic Polypeptide

SEQ ID NO: 22343 - protein, 117 aa, Artificial Sequence; identical to SEQ ID NO: 11212
  Synthetic Polypeptide

SEQ ID NO: 22344 - protein, 117 aa, Artificial Sequence; identical to SEQ ID NO: 11212
  Synthetic Polypeptide

SEQ ID NO: 22345 - protein, 119 aa, Artificial Sequence
  Synthetic Polypeptide
EVQLVESGGGLVQPGGSLRLSCAASGFDFSRYWMSWVRQAPGKGLEWIGEINPDSSTINYTPSLKDKFIISRDNAKNSLYLQMNSLRAEDTAVYYCARPDGNYWYFDVWGQGTLVTVSS

SEQ ID NO: 22346 - protein, 109 aa, Artificial Sequence; identical to SEQ ID NO: 22332
  Synthetic Polypeptide

SEQ ID NO: 22347 - protein, 9 aa, Artificial Sequence
  Synthetic Polypeptide
GGGGGGGGG

SEQ ID NO: 22348 - protein, 9 aa, Artificial Sequence
  Synthetic Polypeptide
GGGGGGGGG

SEQ ID NO: 22349 - protein, 9 aa, Artificial Sequence
  Synthetic Polypeptide
GGGGGGGGG

SEQ ID NO: 22350 - protein, 9 aa, Artificial Sequence
  Synthetic Polypeptide
GGGGGGGGG

SEQ ID NO: 22351 - protein, 9 aa, Artificial Sequence
  Synthetic Polypeptide
GGGGGGGGG

SEQ ID NO: 22352 - protein, 9 aa, Artificial Sequence
  Synthetic Polypeptide
GGGGGGGGG

SEQ ID NO: 22353 - protein, 9 aa, Artificial Sequence
  Synthetic Polypeptide
GGGGGGGGG

SEQ ID NO: 22354 - protein, 238 aa, Artificial Sequence
  Synthetic Polypeptide
DIQMTQSPSSLSASVGDRVTITCKASQDVGTAVDWYQQKPGKAPKLLIYWASTRHTGVPSRFSGSGSGTDFTLTISSLQPEDFATYYCQQANSYPLTFGQGTKVEIKRGGGGSGGGGSGGGGSEVQLVESGGGLVQPGGSLRLSCAASGFTFTDYTIHWVRQAPGKGLEWVANINPNNGGTTYNQKFEDRFTISRDNSKNTLYLQMNSLRAEDTAVYYCARGWNFDYWGQGTLVTVSS

SEQ ID NO: 22355 - protein, 244 aa, Artificial Sequence
  Synthetic Polypeptide
DIQMTQSPSSLSASVGDRVTITCRASQDVNTAVAWYQQKPGKAPKLLIYSASFLESGVPSRFSGSRSGTDFTLTISSLQPEDFATYYCQQAYTTPPTFGQGTKVEIKRTGGGGSGGGGSGGGGSEVQLVESGGGLVQPGGSLRLSCAASGFNIKDTYIHWVRQAPGKGLEWVARIYPTNGYTRYADSVKGRFTISADTSKNTAYLQMNSLRAEDTAVYYCSRWGGDGFAAMDVWGQGTLVTVSS

SEQ ID NO: 22356 - protein, 240 aa, Artificial Sequence; identical to SEQ ID NO: 11454
  Synthetic Polypeptide

SEQ ID NO: 22357 - protein, 240 aa, Artificial Sequence; identical to SEQ ID NO: 11497
  Synthetic Polypeptide

SEQ ID NO: 22358 - protein, 240 aa, Artificial Sequence; identical to SEQ ID NO: 11499
  Synthetic Polypeptide

SEQ ID NO: 22359 - protein, 222 aa, Artificial Sequence
  Synthetic Polypeptide
ITCKASQDVGIAVAWYQQKPGKVPKLLIYWASTRHTGVPDRFSGSGSGTDFTLTISSLQPEDVATYYCQQYSSYPYTFGQGTKVEIKRGGGGSGGGGSGGGGSEVQLVESGGGLVQPGGSLRLSCAASGFDFSRYWMSWVRQAPGKGLEWIGEINPDSSTINYTPSLKDKFIISRDNAKNSLYLQMNSLRAEDTAVYYCARPDGNYWYFDVWGQGTLVTVSS

SEQ ID NO: 22360 - protein, 237 aa, Artificial Sequence
  Synthetic Polypeptide
QAVVTQEPSLTVSPGGTVTLTCGSSTGAVTTSNYASWVQEKPDHLFRGLIGGTNNRAPGVPARFSGSLLGGKAALTISGAQPEDEAIYFCVLWYSDHWVFGGGTKLTVDGGGGSGGGGSGGGGSQVQLQQSGPGLVKPSETLSITCTVSGFLLTDYGVNWVRQPPGKGLEWLGVIWGDGITDYNPSLKSRLTVSKDTSKNQVSLKMSSLTDADTARYYCVTGLFDYWGQGTTLTVSS

SEQ ID NO: 22361 - protein, 9 aa, Artificial Sequence
  Synthetic Polypeptide
GGGGGGGGG

SEQ ID NO: 22362 - protein, 9 aa, Artificial Sequence
  Synthetic Polypeptide
GGGGGGGGG

SEQ ID NO: 22363 - protein, 9 aa, Artificial Sequence
  Synthetic Polypeptide
GGGGGGGGG

SEQ ID NO: 22364 - protein, 9 aa, Artificial Sequence
  Synthetic Polypeptide
GGGGGGGGG

SEQ ID NO: 22365 - protein, 9 aa, Artificial Sequence
  Synthetic Polypeptide
GGGGGGGGG

SEQ ID NO: 22366 - protein, 9 aa, Artificial Sequence
  Synthetic Polypeptide
GGGGGGGGG

SEQ ID NO: 22367 - protein, 9 aa, Artificial Sequence
  Synthetic Polypeptide
GGGGGGGGG

SEQ ID NO: 22368 - protein, 115 aa, Artificial Sequence
  Synthetic Polypeptide
EVQLVESGGGLVQAGGSLRLSCAASGSVFSGNVMGWYRQAPGKEREWVAAIASGGSIYYRDSVKGRFTISRDNAKNTVYLQMNSLKPEDTAVYYCNSHPPTLPYWGLGTQVTVSS

SEQ ID NO: 22369 - protein, 113 aa, Artificial Sequence
  Synthetic Polypeptide
EVQLLESGGGLVQPGGSLRLSCAASGFSFSGYALSWVRQAPGKGLEWVSSIGENDGTTDYADAVKGRFTISRDNSKNTLYLQMNSLRVEDTAVYYCVKDGVHWGQGTLVTVSS

SEQ ID NO: 22370 - protein, 113 aa, Artificial Sequence
  Synthetic Polypeptide
EVQLLESGGGLVQPGGSLRLSCAASGFSFSSYALSWVRQAPGKGLEWVSSIGENDGTTDYADAVKGRFTISRDNSKNTLYLQMNSLRVEDTAVYYCVKDGIHWGQGTLVTVSS

SEQ ID NO: 22371 - protein, 113 aa, Artificial Sequence
  Synthetic Polypeptide
EVQLLESGGGLVQPGGSLRLSCAASGFSFSGYALSWVRQAPGKGLEWVSSIGENDGTTDYADAVKGRFTISRDNSKNTLYLQMNSLRVEDTAVYYCVKDGIHWGQGTLVTVSS

SEQ ID NO: 22372 - protein, 127 aa, Artificial Sequence
  Synthetic Polypeptide
EVQLVESGGGVVQPGRSLRLSCAASGFSFSGYGMHWVRQAPGKGLEWVAYISYDGSNKYYADSVKGRFTISRDNSKNTLYLQMNSLRAEDTAVYYCAKDPAWGLRLGESSSYDFDYWGQGTMVTVSS

SEQ ID NO: 22373 - protein, 123 aa, Artificial Sequence
  Synthetic Polypeptide
EVQLVESGGGVVQPGRSLRLSCAASGFPLISYGMHWVRQAPGKGLEWVAFMTYDGSNRYYADSVKGRFTISRDNSKNTLYLQMNSLRDEDTALYYCARDRIVGGRVPDSFDYWGQGTMVTVSS

SEQ ID NO: 22374 - protein, 126 aa, Artificial Sequence
  Synthetic Polypeptide
QVQLQESGAGLLKPSETLSLTCAVYGGSFSAYNWNWIRQPPGKGLEWIGEINHRGDTAYNPSLKSRVTISVDTSKNQFSLNLTSVTAADTAVYYCAARGYSYGWPPGYISDAFDIWGQGTQVTVSS

SEQ ID NO: 22375 - protein, 119 aa, Artificial Sequence
  Synthetic Polypeptide
DVQLVESGGGVVQPGKSLRLSCAASGSIFSIHAMGWFRQAPGKEREFVAAITWSGGITYYEDSVKGRFTISRDNSKNTVYLQMNSLRPEDTAIYYCAADRAESSWYDYWGQGTLVTVSS

SEQ ID NO: 22376 - protein, 119 aa, Artificial Sequence
  Synthetic Polypeptide
EVQLLESGGGLVQPGGSLRLSCAASGSIASIHAMGWFRQAPGKEREFVAVITWSGGITYYADSVKGRFTISRDNSKNTVYLQMNSLRPEDTALYYCAGDKHQSSWYDYWGQGTLVTVSS

SEQ ID NO: 22377 - protein, 119 aa, Artificial Sequence
  Synthetic Polypeptide
EVQLVESGGGLVQAGGSLRLSCAASGSIASIHAMGWFRQAPGKEREFVAVITWSGGITYYADSVKGRFTISRDNAKNTVYLQMNSLKPEDTAIYYCAGDKHQSSWYDYWGQGTQVTVSS

SEQ ID NO: 22378 - protein, 118 aa, Artificial Sequence
  Synthetic Polypeptide
QLQLQESGPGLVKPSETLSLTCTVSGGSIDSRIYYWGWIRQPPGKGLEWIGHIYYSGATYYNPSLKSRVTISVDTSRNQFSLKLSSVTAADTAVYYCTRDDSSNWRSRGQGTLVTVSS

SEQ ID NO: 22379 - protein, 9 aa, Artificial Sequence
  Synthetic Polypeptide
GGGGGGGGG

SEQ ID NO: 22380 - protein, 9 aa, Artificial Sequence
  Synthetic Polypeptide
GGGGGGGGG

SEQ ID NO: 22381 - protein, 9 aa, Artificial Sequence
  Synthetic Polypeptide
GGGGGGGGG

SEQ ID NO: 22382 - protein, 9 aa, Artificial Sequence
  Synthetic Polypeptide
GGGGGGGGG

SEQ ID NO: 22383 - protein, 168 aa, Artificial Sequence
  Synthetic Polypeptide
MGSWFEFYDRLNAIDARLWALGGSEAELAAFEKEIAAFESELQAYKGKGNPEVENLRVHAAAIREWLQAYRHNGGGGSGGGGSGMGSWLEFYHRLNAIDSRLWALGGSEAELAAFEKEIAAFESELQAYKGKGNPEVESLRDHAAHIREWLQAYRHNGGGGSGGGGSG

SEQ ID NO: 22384 - protein, 73 aa, Artificial Sequence
  Synthetic Polypeptide
MGSWSEFWVRLGAIRERLDALGGSEAELAAFEKEIAAFESELQAYKGKGNPEVEKLRYTAATIRRFLQAYRHN

SEQ ID NO: 22385 - protein, 73 aa, Artificial Sequence
  Synthetic Polypeptide
MGSWDEFGRRLYAIEWRLYALGGSEAELAAFEKEIAAFESELQAYKGKGNPEVEKLREIAAVIRSNLQAYRHN

SEQ ID NO: 22386 - protein, 474 aa, Artificial Sequence
  Synthetic Polypeptide
MALPVTALLLPLALLLHAARPACDEGGGGSMGSWSEFWVRLGAIRERLDALGGSEAELAAFEKEIAAFESELQAYKGKGNPEVEKLRYTAATIRRFLQAYRHNGTGGGGSGGGGSGGGGSGLEKCFQTENPLECQDKGEEELQKYIQESQALAKRSCGLFQKLGEYYLQNAFLVAYTKKAPQLTSSELMAITRKMAATAATCCQLSEDKLLACGEGAADIIIGHLCIRHEMTPVNPGVGQCCTSSYANRRPCFSSLVVDETYVPPAFSDDKFIFHKDLCQAQGVALQTMKQEFLINLVKQKPQITEEQLEAVIADFSGLLEKCCQGQEQEVCFAEEGQKLISKTRAALGVGGGGSGGGGSGGGGSGPMGSWDEFGRRLYAIEWRLYALGGSEAELAAFEKEIAAFESELQAYKGKGNPEVEKLREIAAVIRSNLQAYRHNGSGGGGSGGGGSGGGGSHHHHHHHHHHTRPRLCL

SEQ ID NO: 22387 - protein, 73 aa, Artificial Sequence
  Synthetic Polypeptide
MGSWEEFELRLNAIEERLYALGGSEAELAYFEYVIADFEGNLQRYKGKGNPEVEALYFEADAIFEELVAYRHN

SEQ ID NO: 22388 - protein, 73 aa, Artificial Sequence
  Synthetic Polypeptide
MGSWFEFNHRLWAIFERLMALGGSEAELAAFEKEIAAFESELQAYKGKGNPEVEYLRAMAAVIRYHLQAYRHN

SEQ ID NO: 22389 - protein, 73 aa, Artificial Sequence
  Synthetic Polypeptide
MGSWVEFYNRLWAIDHRLHALGGSEAELAAFEKEIAAFESELQAYKGKGNPEVEVLRYHAASIRVTLQAYRHN

SEQ ID NO: 22390 - protein, 73 aa, Artificial Sequence
  Synthetic Polypeptide
MGSWSEFYDRLHAIHHRLYALGGSEAELAAFEKEIAAFESELQAYKGKGNPEVEALRDTAAFIRTRLQAYRHN

SEQ ID NO: 22391 - protein, 276 aa, Artificial Sequence
  Synthetic Polypeptide
EPHSLRYNLTVLSWDGSVQSGFLTEVHLDGQPFLRCDRQKCRAKPQGQWAEDVLGNKTWDRETRDLTGNGKDLRMTLAHIKDQKEGLHSLQEIRVCEIHEDNSTRSSQHFYYDGELFLSQNLETKEWTMPQSSRAQTLAMNVRNFLKEDAMKTKTHYHAMHADCLQELRRYLKSGVVLRRTVPPMVNVTRSEASEGNITVTCRASGFYPWNITLSWRQDGVSLSHDTQQWGDVLPDGNGTYQTWVATRICQGEEQRFTCYMEHSGNHSTHPVPSGK

SEQ ID NO: 22392 - protein, 189 aa, Artificial Sequence
  Synthetic Polypeptide
AAEPHSLSYDITVIPKFRPGPRWCAVQGQVDEKTFLHYDCGNKTVTPVSPLGKKLNVTTAWKAQNPVLREVVDILTEQLRDIQLENYTPKEPLTLQARMSCEQKAEGHSSGSWQFSFDGQIFLLFDSEKRMWTTVHPGARKMKEKWENDKVVAMSFHYFSMGDCIGWLEDFLMGMDSTLEPSAGAPPMV

SEQ ID NO: 22393 - protein, 9 aa, Artificial Sequence
  Synthetic Polypeptide
GGGGGGGGG

SEQ ID NO: 22394 - protein, 9 aa, Artificial Sequence
  Synthetic Polypeptide
GGGGGGGGG

SEQ ID NO: 22395 - protein, 9 aa, Artificial Sequence
  Synthetic Polypeptide
GGGGGGGGG

SEQ ID NO: 22396 - protein, 115 aa, Artificial Sequence
  Synthetic Polypeptide
KNQVEQSPQSLIILEGKNCTLQCNYTVSPFSNLRWYKQDTGRGPVSLTIMTFSENTKSNGRYTATLDADTKQSSLHITASQLSDSASYICVVSDRGSTLGRLYFGRGTQLTVWPD

SEQ ID NO: 22397 - protein, 111 aa, Artificial Sequence
  Synthetic Polypeptide
DIYQTPRYLVIGTGKKITLECSQTMGHDKMYWYQQDPGMELHLIHYSYGVNSTEKGDLSSESTVSRIRTEHFPLTLESARPSHTSQYLCASSENIGTAYEQYFGPGTRLTV

SEQ ID NO: 22398 - protein, 9 aa, Artificial Sequence
  Synthetic Polypeptide
GGGGGGGGG

SEQ ID NO: 22399 - protein, 119 aa, Artificial Sequence
  Synthetic Polypeptide
GVTQSPTHLIKTRGQQATLRCSPISGHTSVYWYQQALGLGLQFLLWYDEGEERNRGNFPPRFSGRQFPNYSSELNVNALELEDSALYLCASSLGGPRGLAGLRGDEQFFGPGTRLTVLE

SEQ ID NO: 22400 - protein, 117 aa, Artificial Sequence
  Synthetic Polypeptide
GVTQSPTHLIKTRGQQATLRCSPISGHTSVYWYQQALGLGLQFLLWYDEGEERNRGNFPPRFSGRQFPNYSSELNVNALELEDSALYLCASSLGGDELGADGNEQFFGPGTRLTVLE

SEQ ID NO: 22401 - protein, 9 aa, Artificial Sequence
  Synthetic Polypeptide
GGGGGGGGG

SEQ ID NO: 22402 - protein, 134 aa, Artificial Sequence
  Synthetic Polypeptide
VLHLVPINATSKDDSDVTEVMWQPALRRGRGLQAQGYGVRIQDAGVYLLYSQVLFQDVTFTMGQVVSREGQGRQETLFRCIRSMPSHPDRAYNSCYSAGVFHLHQGDILSVIIPRARAKLNLSPHGTFLGFVKL

SEQ ID NO: 22403 - protein, 134 aa, Artificial Sequence; identical to SEQ ID NO: 22402
  Synthetic Polypeptide

SEQ ID NO: 22404 - protein, 172 aa, Artificial Sequence
  Synthetic Polypeptide
GLLDLRQGMFAQLVAQNVLLIDGPLSWYSDPGLAGVSLTGGLSYKEDTKELVVAKAGVYYVFFQLELRRVVAGEGSGSVSLALHLQPLRSAAGAAALALTVDLPPASSEARNSAFGFQGRLLHLSAGQRLGVHLHTEARARHAWQLTQGATVLGLFRVTPEIPAGLPSPRSE

SEQ ID NO: 22405 - protein, 9 aa, Artificial Sequence
  Synthetic Polypeptide
GGGGGGGGG

SEQ ID NO: 22406 - protein, 221 aa, Artificial Sequence
  Synthetic Polypeptide
EWVKFAKPCREGEDNSKRNPIAKITSDYQATQKITYRISGVGIDQPPFGIFVVDKNTGDINITAIVDREETPSFLITCRALNAQGLDVEKPLILTVKILDINDNPPVFSQQIFMGEIEENSASNSLVMILNATDADEPNHLNSKIAFKIVSQEPAGTPMFLLSRNTGEVRTLTNSLDREQASSYRLVVSGADKDGEGLSTQCECNIKVKDVNDNFPMFRDS

SEQ ID NO: 22407 - protein, 450 aa, Artificial Sequence
  Synthetic Polypeptide
EWVKFAKPCREGEDNSKRNPIAKITSDYQATQKITYRISGVGIDQPPFGIFVVDKNTGDINITAIVDREETPSFLITCRALNAQGLDVEKPLILTVKILDINDNPPVFSQQIFMGEIEENSASNSLVMILNATDADEPNHLNSKIAFKIVSQEPAGTPMFLLSRNTGEVRTLTNSLDREQASSYRLVVSGADKDGEGLSTQCECNIKVKDVNDNFPMFRDSQYSARIEENILSSELLRFQVTDLDEEYTDNWLAVYFFTSGNEGNWFEIQTDPRTNEGILKVVKALDYEQLQSVKLSIAVKNKAEFHQSVISRYRVQSTPVTIQVINVREGIAFRPASKTFTVQKGISSKKLVDYILGTYQAIDEDTNKAASNVKYVMGRNDGGYLMIDSKTAEIKFVKNMNRDSTFIVNKTITAEVLAIDEYTGKTSTGTVYVRVPDFNDNCPTAVLEK

SEQ ID NO: 22408 - protein, 231 aa, Artificial Sequence
  Synthetic Polypeptide
DSQYSARIEENILSSELLRFQVTDLDEEYTDNWLAVYFFTSGNEGNWFEIQTDPRTNEGILKVVKALDYEQLQSVKLSIAVKNKAEFHQSVISRYRVQSTPVTIQVINVREGIAFRPASKTFTVQKGISSKKLVDYILGTYQAIDEDTNKAASNVKYVMGRNDGGYLMIDSKTAEIKFVKNMNRDSTFIVNKTITAEVLAIDEYTGKTSTGTVYVRVPDFNDNCPTAVLEK

SEQ ID NO: 22409 - protein, 261 aa, Artificial Sequence
  Synthetic Polypeptide
DSQYSARIEENILSSELLRFQVTDLDEEYTDNWLAVYFFTSGNEGNWFEIQTDPRTNEGILKVVKALDYEQLQSVKLSIAVKNKAEFHQSVISRYRVQSTPVTIQVINVREGIAFRPASKTFTVQKGISSKKLVDYILGTYQAIDEDTNKAASNVKYVMGRNDGGYLMIDSKTAEIKFVKNMNRDSTFIVNKTITAEVLAIDEYTGKTSTGTVYVRVPDFNDNCPTAVLEKDAVCSSSPSVVVSARTLNNRYTGPYTFALE

SEQ ID NO: 22410 - protein, 9 aa, Artificial Sequence
  Synthetic Polypeptide
GGGGGGGGG

SEQ ID NO: 22411 - protein, 17 aa, Artificial Sequence
  Synthetic Polypeptide
INIYNAEPANPSEKNSP

SEQ ID NO: 22412 - protein, 23 aa, Artificial Sequence
  Synthetic Polypeptide
YINIYNAEPANPSEKNSPTQYAY

SEQ ID NO: 22413 - protein, 24 aa, Artificial Sequence
  Synthetic Polypeptide
YINIYNAEPANPSEKNSPSTQYAY

SEQ ID NO: 22414 - protein, 142 aa, Artificial Sequence
  Synthetic Polypeptide
YINIYNAEPANPSEKNSPSTQYAYGSGSSYINIYNAEPANPSEKNSPSTQYAYGSGGSYINIYNAEPANPSEKNSPSTQYAYGSGSSSYINIYNAEPANPSEKNSPSTQYAYGSGSGSYINIYNAEPANPSEKNSPSTQYAY

SEQ ID NO: 22415 - protein, 28 aa, Artificial Sequence
  Synthetic Polypeptide
YINIYNAEPANPSEKNSPSTQYAYGGGS

SEQ ID NO: 22416 - protein, 59 aa, Artificial Sequence
  Synthetic Polypeptide
YINIYNAEPANPSEKNSPSTQYAYGGSGGSYINIYNAEPANPSEKNSPSTQYAYSGSGS

SEQ ID NO: 22417 - protein, 52 aa, Artificial Sequence
  Synthetic Polypeptide
YINIYNAEPANPSEKNSPSTQYAYGGGSYINIYNAEPANPSEKNSPSTQYAY

SEQ ID NO: 22418 - protein, 27 aa, Artificial Sequence
  Synthetic Polypeptide
SGSGCPYSNPSLCSGSGGCPYSNPSLC

SEQ ID NO: 22419 - protein, 141 aa, Artificial Sequence
  Synthetic Polypeptide
QDKLTQWPKWLEGGGGSELPTQGTFSNVSTNVSGGGGQDKLTQWPKWLEGGGGSELPTQGTFSNVSTNVSKIEVMYPPPYLDNEKSNGTIIHVKGKHLCPSPLFPGPSKPFWVLVVVGGVLACYSLLVTVAFIIFWVRSKR

SEQ ID NO: 22420 - protein, 43 aa, Artificial Sequence
  Synthetic Polypeptide
YINIYNAEPANPSEKNSPSTQYAYGGGSQLGPYELWELSHGSG

SEQ ID NO: 22421 - protein, 32 aa, Artificial Sequence
  Synthetic Polypeptide
GSGSCQFDLSTRRLKCGSGSCQFDLSTRRLKC

SEQ ID NO: 22422 - protein, 32 aa, Artificial Sequence
  Synthetic Polypeptide
CQFDLSTRRLKCGGGSCQFDLSTRRLKCGGGS

SEQ ID NO: 22423 - protein, 13 aa, Artificial Sequence
  Synthetic Polypeptide
SCQFDLSTRRLKC

SEQ ID NO: 22424 - protein, 32 aa, Artificial Sequence
  Synthetic Polypeptide
CQYNLSSRALKCGGGSCQYNLSSRALKCGGGS

SEQ ID NO: 22425 - protein, 13 aa, Artificial Sequence
  Synthetic Polypeptide
SCQYNLSSRALKC

SEQ ID NO: 22426 - protein, 17 aa, Artificial Sequence
  Synthetic Polypeptide
GFLLIQAWPENRTDLHA

SEQ ID NO: 22427 - protein, 15 aa, Artificial Sequence
  Synthetic Polypeptide
IYPPLLRTSQAMGSG

SEQ ID NO: 22428 - protein, 15 aa, Artificial Sequence
  Synthetic Polypeptide
GCPKWDAARCSGGGS

SEQ ID NO: 22429 - protein, 13 aa, Artificial Sequence
  Synthetic Polypeptide
GCGPYTWNSCSGG

SEQ ID NO: 22430 - protein, 29 aa, Artificial Sequence
  Synthetic Polypeptide
SYPPLLRTSQAMSGGGSYPPLLRTSQAMS

SEQ ID NO: 22431 - protein, 13 aa, Artificial Sequence
  Synthetic Polypeptide
SYPPLLRTSQAMS

SEQ ID NO: 22432 - protein, 15 aa, Artificial Sequence
  Synthetic Polypeptide
QLGPYELWELSHGSG

SEQ ID NO: 22433 - protein, 53 aa, Artificial Sequence
  Synthetic Polypeptide
QLGPYELWELSHGSGSGSGSQLGPYELWELSHSGGGSGQLGPYELWELSHGSS

SEQ ID NO: 22434 - protein, 9 aa, Artificial Sequence
  Synthetic Polypeptide
GGGGGGGGG

SEQ ID NO: 22435 - protein, 9 aa, Artificial Sequence
  Synthetic Polypeptide
GGGGGGGGG

SEQ ID NO: 22436 - protein, 9 aa, Artificial Sequence
  Synthetic Polypeptide
GGGGGGGGG

SEQ ID NO: 22437 - protein, 9 aa, Artificial Sequence
  Synthetic Polypeptide
GGGGGGGGG

SEQ ID NO: 22438 - protein, 9 aa, Artificial Sequence
  Synthetic Polypeptide
GGGGGGGGG

SEQ ID NO: 22439 - protein, 9 aa, Artificial Sequence
  Synthetic Polypeptide
GGGGGGGGG

SEQ ID NO: 22440 - protein, 9 aa, Artificial Sequence
  Synthetic Polypeptide
GGGGGGGGG

SEQ ID NO: 22441 - protein, 9 aa, Artificial Sequence
  Synthetic Polypeptide
GGGGGGGGG

SEQ ID NO: 22442 - protein, 9 aa, Artificial Sequence
  Synthetic Polypeptide
GGGGGGGGG

SEQ ID NO: 22443 - protein, 9 aa, Artificial Sequence
  Synthetic Polypeptide
GGGGGGGGG

SEQ ID NO: 22444 - protein, 9 aa, Artificial Sequence
  Synthetic Polypeptide
GGGGGGGGG

SEQ ID NO: 22445 - protein, 574 aa, Artificial Sequence
  Synthetic Polypeptide
MALPVTALLLPLALLLHAARPMDPDLEIRAAFLRQRNTALRTEVAELEQEVQRLENEVSQYETRYGPLGGGKLEGQPKANPTVTLFPPSSEELQANKATLVCLISDFYPGAVTVAWKADGSPVKAGVETTKPSKQSNNKYAASSYLSLTPEQWKSHRSYSCQVTHEGSTVEKTVAPTECSGRADCGFTSESYQQGVLSATILYEILLGKATLYAVLVSALVLMAMVKRKDSRGRAKRSGSGATNFSLLKQAGDVEENPGPTSMDWIWRILFLVGAATGAHSFEVQLVESGGGVVQPGRSLRLSCAASGFSFSGYGMHWVRQAPGKGLEWVAYISYDGSNKYYADSVKGRFTISRDNSKNTLYLQMNSLRAEDTAVYYCAKDPAWGLRLGESSSYDFDIWGQGTMVTVSSTRASTKGPSVFPLAPSSKSTSGGTAALGCLVKDYFPEPVTVSWNSGALTSGVHTFPAVLQSSGLYSLSSVVTVPSSSLGTQTYICNVNHKPSNTKVDKRVEPKSCIPEDTFFPSPESSCDVKLVEKSFETDTNLNFQNLSVIGFRILLLKVAGFNLLMTLRLWSS

SEQ ID NO: 22446 - protein, 499 aa, Artificial Sequence
  Synthetic Polypeptide
MALPVTALLLPLALLLHAARPMDPDLEIRAAFLRQRNTALRTEVAELEQEVQRLENEVSQYETRYGPLGGGKLEGQPKANPTVTLFPPSSEELQANKATLVCLISDFYPGAVTVAWKADGSPVKAGVETTKPSKQSNNKYAASSYLSLTPEQWKSHRSYSCQVTHEGSTVEKTVAPTECSGRADCGFTSESYQQGVLSATILYEILLGKATLYAVLVSALVLMAMVKRKDSRGRAKRSGSGATNFSLLKQAGDVEENPGPTSMDWIWRILFLVGAATGAHSFEMDPDLEIRAAFLRQRNTALRTEVAELEQEVQRLENEVSQYETRYGPLGGGKTRASTKGPSVFPLAPSSKSTSGGTAALGCLVKDYFPEPVTVSWNSGALTSGVHTFPAVLQSSGLYSLSSVVTVPSSSLGTQTYICNVNHKPSNTKVDKRVEPKSCIPEDTFFPSPESSCDVKLVEKSFETDTNLNFQNLSVIGFRILLLKVAGFNLLMTLRLWSS

SEQ ID NO: 22447 - protein, 476 aa, Artificial Sequence
  Synthetic Polypeptide
MALPVTALLLPLALLLHAARPEVAALEKEVAALEKEVAALEKEVAALEKLEGQPKANPTVTLFPPSSEELQANKATLVCLISDFYPGAVTVAWKADGSPVKAGVETTKPSKQSNNKYAASSYLSLTPEQWKSHRSYSCQVTHEGSTVEKTVAPTECSGRADCGFTSESYQQGVLSATILYEILLGKATLYAVLVSALVLMAMVKRKDSRGRAKRSGSGATNFSLLKQAGDVEENPGPTSMDWIWRILFLVGAATGAHSFEMDPDLEIRAAFLRQRNTALRTEVAELEQEVQRLENEVSQYETRYGPLGGGKTRASTKGPSVFPLAPSSKSTSGGTAALGCLVKDYFPEPVTVSWNSGALTSGVHTFPAVLQSSGLYSLSSVVTVPSSSLGTQTYICNVNHKPSNTKVDKRVEPKSCIPEDTFFPSPESSCDVKLVEKSFETDTNLNFQNLSVIGFRILLLKVAGFNLLMTLRLWSS

SEQ ID NO: 22448 - protein, 453 aa, Artificial Sequence
  Synthetic Polypeptide
MALPVTALLLPLALLLHAARPEVAALEKEVAALEKEVAALEKEVAALEKLEGQPKANPTVTLFPPSSEELQANKATLVCLISDFYPGAVTVAWKADGSPVKAGVETTKPSKQSNNKYAASSYLSLTPEQWKSHRSYSCQVTHEGSTVEKTVAPTECSGRADCGFTSESYQQGVLSATILYEILLGKATLYAVLVSALVLMAMVKRKDSRGRAKRSGSGATNFSLLKQAGDVEENPGPTSMDWIWRILFLVGAATGAHSFEEVAALEKEVAALEKEVAALEKEVAALEKTRASTKGPSVFPLAPSSKSTSGGTAALGCLVKDYFPEPVTVSWNSGALTSGVHTFPAVLQSSGLYSLSSVVTVPSSSLGTQTYICNVNHKPSNTKVDKRVEPKSCIPEDTFFPSPESSCDVKLVEKSFETDTNLNFQNLSVIGFRILLLKVAGFNLLMTLRLWSS

SEQ ID NO: 22449 - protein, 658 aa, Artificial Sequence
  Synthetic Polypeptide
MALPVTALLLPLALLLHAARPLFNQEVQIPLTESYCGPCPKNWICYKNNCYQFFDESKNWYESQASCMSQNASLLKVYSKEDQDLLKLVKSAHWMGLVHIPTNGSWQWEDGSILSPNLLTIIEMQKGDCALYASSFKGFIENCSTPNTYICMQRTVLEGQPKANPTVTLFPPSSEELQANKATLVCLISDFYPGAVTVAWKADGSPVKAGVETTKPSKQSNNKYAASSYLSLTPEQWKSHRSYSCQVTHEGSTVEKTVAPTECSGRADCGFTSESYQQGVLSATILYEILLGKATLYAVLVSALVLMAMVKRKDSRGRAKRSGSGATNFSLLKQAGDVEENPGPTSMDWIWRILFLVGAATGAHSFEVQLVESGGGVVQPGRSLRLSCAASGFSFSGYGMHWVRQAPGKGLEWVAYISYDGSNKYYADSVKGRFTISRDNSKNTLYLQMNSLRAEDTAVYYCAKDPAWGLRLGESSSYDFDIWGQGTMVTVSSTRASTKGPSVFPLAPSSKSTSGGTAALGCLVKDYFPEPVTVSWNSGALTSGVHTFPAVLQSSGLYSLSSVVTVPSSSLGTQTYICNVNHKPSNTKVDKRVEPKSCIPEDTFFPSPESSCDVKLVEKSFETDTNLNFQNLSVIGFRILLLKVAGFNLLMTLRLWSS

SEQ ID NO: 22450 - protein, 667 aa, Artificial Sequence
  Synthetic Polypeptide
MALPVTALLLPLALLLHAARPLFNQEVQIPLTESYCGPCPKNWICYKNNCYQFFDESKNWYESQASCMSQNASLLKVYSKEDQDLLKLVKSAHWMGLVHIPTNGSWQWEDGSILSPNLLTIIEMQKGDCALYASSFKGFIENCSTPNTYICMQRTVLEGQPKANPTVTLFPPSSEELQANKATLVCLISDFYPGAVTVAWKADGSPVKAGVETTKPSKQSNNKYAASSYLSLTPEQWKSHRSYSCQVTHEGSTVEKTVAPTECSGRADCGFTSESYQQGVLSATILYEILLGKATLYAVLVSALVLMAMVKRKDSRGRAKRSGSGATNFSLLKQAGDVEENPGPTSMDWIWRILFLVGAATGAHSFELFNQEVQIPLTESYCGPCPKNWICYKNNCYQFFDESKNWYESQASCMSQNASLLKVYSKEDQDLLKLVKSAHWMGLVHIPTNGSWQWEDGSILSPNLLTIIEMQKGDCALYASSFKGFIENCSTPNTYICMQRTVTRASTKGPSVFPLAPSSKSTSGGTAALGCLVKDYFPEPVTVSWNSGALTSGVHTFPAVLQSSGLYSLSSVVTVPSSSLGTQTYICNVNHKPSNTKVDKRVEPKSCIPEDTFFPSPESSCDVKLVEKSFETDTNLNFQNLSVIGFRILLLKVAGFNLLMTLRLWSS

SEQ ID NO: 22451 - protein, 715 aa, Artificial Sequence
  Synthetic Polypeptide
MALPVTALLLPLALLLHAARPGMRTEDLPKAVVFLEPQWYRVLEKDSVTLKCQGAYSPEDNSTQWFHNESLISSQASSYFIDAATVDDSGEYRCQTNLSTLSDPVQLEVHIGWLLLQAPRWVFKEEDPIHLRCHSWKNTALHKVTYLQNGKGRKYFHHNSDFYIPKATLKDSGSYFCRGLVGSKNVSSETVNITITQGLAVSTISSFFPPGYQLEGQPKANPTVTLFPPSSEELQANKATLVCLISDFYPGAVTVAWKADGSPVKAGVETTKPSKQSNNKYAASSYLSLTPEQWKSHRSYSCQVTHEGSTVEKTVAPTECSGRADCGFTSESYQQGVLSATILYEILLGKATLYAVLVSALVLMAMVKRKDSRGRAKRSGSGATNFSLLKQAGDVEENPGPTSMDWIWRILFLVGAATGAHSFEVQLVESGGGVVQPGRSLRLSCAASGFSFSGYGMHWVRQAPGKGLEWVAYISYDGSNKYYADSVKGRFTISRDNSKNTLYLQMNSLRAEDTAVYYCAKDPAWGLRLGESSSYDFDIWGQGTMVTVSSTRASTKGPSVFPLAPSSKSTSGGTAALGCLVKDYFPEPVTVSWNSGALTSGVHTFPAVLQSSGLYSLSSVVTVPSSSLGTQTYICNVNHKPSNTKVDKRVEPKSCIPEDTFFPSPESSCDVKLVEKSFETDTNLNFQNLSVIGFRILLLKVAGFNLLMTLRLWSS

SEQ ID NO: 22452 - protein, 781 aa, Artificial Sequence
  Synthetic Polypeptide
MALPVTALLLPLALLLHAARPGMRTEDLPKAVVFLEPQWYRVLEKDSVTLKCQGAYSPEDNSTQWFHNESLISSQASSYFIDAATVDDSGEYRCQTNLSTLSDPVQLEVHIGWLLLQAPRWVFKEEDPIHLRCHSWKNTALHKVTYLQNGKGRKYFHHNSDFYIPKATLKDSGSYFCRGLVGSKNVSSETVNITITQGLAVSTISSFFPPGYQLEGQPKANPTVTLFPPSSEELQANKATLVCLISDFYPGAVTVAWKADGSPVKAGVETTKPSKQSNNKYAASSYLSLTPEQWKSHRSYSCQVTHEGSTVEKTVAPTECSGRADCGFTSESYQQGVLSATILYEILLGKATLYAVLVSALVLMAMVKRKDSRGRAKRSGSGATNFSLLKQAGDVEENPGPTSMDWIWRILFLVGAATGAHSFEGMRTEDLPKAVVFLEPQWYRVLEKDSVTLKCQGAYSPEDNSTQWFHNESLISSQASSYFIDAATVDDSGEYRCQTNLSTLSDPVQLEVHIGWLLLQAPRWVFKEEDPIHLRCHSWKNTALHKVTYLQNGKGRKYFHHNSDFYIPKATLKDSGSYFCRGLVGSKNVSSETVNITITQGLAVSTISSFFPPGYQTRASTKGPSVFPLAPSSKSTSGGTAALGCLVKDYFPEPVTVSWNSGALTSGVHTFPAVLQSSGLYSLSSVVTVPSSSLGTQTYICNVNHKPSNTKVDKRVEPKSCIPEDTFFPSPESSCDVKLVEKSFETDTNLNFQNLSVIGFRILLLKVAGFNLLMTLRLWSS

SEQ ID NO: 22453 - protein, 596 aa, Artificial Sequence
  Synthetic Polypeptide
MALPVTALLLPLALLLHAARPMDPDLEIRAAFLRQRNTALRTEVAELEQEVQRLENEVSQYETRYGPLGGGKLEGQPKANPTVTLFPPSSEELQANKATLVCLISDFYPGAVTVAWKADGSPVKAGVETTKPSKQSNNKYAASSYLSLTPEQWKSHRSYSCQVTHEGSTVEKTVAPTECSPIKTDVITMDPKDNCSKDANDTLLLQLTNTSAYYMYLLLLLKSVVYFAIITCCLLRRTAFCCNGEKSRAKRSGSGATNFSLLKQAGDVEENPGPTSMDWIWRILFLVGAATGAHSFEVQLVESGGGVVQPGRSLRLSCAASGFSFSGYGMHWVRQAPGKGLEWVAYISYDGSNKYYADSVKGRFTISRDNSKNTLYLQMNSLRAEDTAVYYCAKDPAWGLRLGESSSYDFDIWGQGTMVTVSSTRASTKGPSVFPLAPSSKSTSGGTAALGCLVKDYFPEPVTVSWNSGALTSGVHTFPAVLQSSGLYSLSSVVTVPSSSLGTQTYICNVNHKPSNTKVDKRVEPKSCEVKTDSTDHVKPKETENTKQPSKSCHKPKAIVHTEKVNMMSLTVLGLRMLFAKTVAVNFLLTAKLFFL

SEQ ID NO: 22454 - protein, 521 aa, Artificial Sequence
  Synthetic Polypeptide
MALPVTALLLPLALLLHAARPMDPDLEIRAAFLRQRNTALRTEVAELEQEVQRLENEVSQYETRYGPLGGGKLEGQPKANPTVTLFPPSSEELQANKATLVCLISDFYPGAVTVAWKADGSPVKAGVETTKPSKQSNNKYAASSYLSLTPEQWKSHRSYSCQVTHEGSTVEKTVAPTECSPIKTDVITMDPKDNCSKDANDTLLLQLTNTSAYYMYLLLLLKSVVYFAIITCCLLRRTAFCCNGEKSRAKRSGSGATNFSLLKQAGDVEENPGPTSMDWIWRILFLVGAATGAHSFEMDPDLEIRAAFLRQRNTALRTEVAELEQEVQRLENEVSQYETRYGPLGGGKTRASTKGPSVFPLAPSSKSTSGGTAALGCLVKDYFPEPVTVSWNSGALTSGVHTFPAVLQSSGLYSLSSVVTVPSSSLGTQTYICNVNHKPSNTKVDKRVEPKSCEVKTDSTDHVKPKETENTKQPSKSCHKPKAIVHTEKVNMMSLTVLGLRMLFAKTVAVNFLLTAKLFFL

SEQ ID NO: 22455 - protein, 498 aa, Artificial Sequence
  Synthetic Polypeptide
MALPVTALLLPLALLLHAARPEVAALEKEVAALEKEVAALEKEVAALEKLEGQPKANPTVTLFPPSSEELQANKATLVCLISDFYPGAVTVAWKADGSPVKAGVETTKPSKQSNNKYAASSYLSLTPEQWKSHRSYSCQVTHEGSTVEKTVAPTECSPIKTDVITMDPKDNCSKDANDTLLLQLTNTSAYYMYLLLLLKSVVYFAIITCCLLRRTAFCCNGEKSRAKRSGSGATNFSLLKQAGDVEENPGPTSMDWIWRILFLVGAATGAHSFEMDPDLEIRAAFLRQRNTALRTEVAELEQEVQRLENEVSQYETRYGPLGGGKTRASTKGPSVFPLAPSSKSTSGGTAALGCLVKDYFPEPVTVSWNSGALTSGVHTFPAVLQSSGLYSLSSVVTVPSSSLGTQTYICNVNHKPSNTKVDKRVEPKSCEVKTDSTDHVKPKETENTKQPSKSCHKPKAIVHTEKVNMMSLTVLGLRMLFAKTVAVNFLLTAKLFFL

SEQ ID NO: 22456 - protein, 475 aa, Artificial Sequence
  Synthetic Polypeptide
MALPVTALLLPLALLLHAARPEVAALEKEVAALEKEVAALEKEVAALEKLEGQPKANPTVTLFPPSSEELQANKATLVCLISDFYPGAVTVAWKADGSPVKAGVETTKPSKQSNNKYAASSYLSLTPEQWKSHRSYSCQVTHEGSTVEKTVAPTECSPIKTDVITMDPKDNCSKDANDTLLLQLTNTSAYYMYLLLLLKSVVYFAIITCCLLRRTAFCCNGEKSRAKRSGSGATNFSLLKQAGDVEENPGPTSMDWIWRILFLVGAATGAHSFEEVAALEKEVAALEKEVAALEKEVAALEKTRASTKGPSVFPLAPSSKSTSGGTAALGCLVKDYFPEPVTVSWNSGALTSGVHTFPAVLQSSGLYSLSSVVTVPSSSLGTQTYICNVNHKPSNTKVDKRVEPKSCEVKTDSTDHVKPKETENTKQPSKSCHKPKAIVHTEKVNMMSLTVLGLRMLFAKTVAVNFLLTAKLFFL

SEQ ID NO: 22457 - protein, 680 aa, Artificial Sequence
  Synthetic Polypeptide
MALPVTALLLPLALLLHAARPLFNQEVQIPLTESYCGPCPKNWICYKNNCYQFFDESKNWYESQASCMSQNASLLKVYSKEDQDLLKLVKSAHWMGLVHIPTNGSWQWEDGSILSPNLLTIIEMQKGDCALYASSFKGFIENCSTPNTYICMQRTVLEGQPKANPTVTLFPPSSEELQANKATLVCLISDFYPGAVTVAWKADGSPVKAGVETTKPSKQSNNKYAASSYLSLTPEQWKSHRSYSCQVTHEGSTVEKTVAPTECSPIKTDVITMDPKDNCSKDANDTLLLQLTNTSAYYMYLLLLLKSVVYFAIITCCLLRRTAFCCNGEKSRAKRSGSGATNFSLLKQAGDVEENPGPTSMDWIWRILFLVGAATGAHSFEVQLVESGGGVVQPGRSLRLSCAASGFSFSGYGMHWVRQAPGKGLEWVAYISYDGSNKYYADSVKGRFTISRDNSKNTLYLQMNSLRAEDTAVYYCAKDPAWGLRLGESSSYDFDIWGQGTMVTVSSTRASTKGPSVFPLAPSSKSTSGGTAALGCLVKDYFPEPVTVSWNSGALTSGVHTFPAVLQSSGLYSLSSVVTVPSSSLGTQTYICNVNHKPSNTKVDKRVEPKSCEVKTDSTDHVKPKETENTKQPSKSCHKPKAIVHTEKVNMMSLTVLGLRMLFAKTVAVNFLLTAKLFFL

SEQ ID NO: 22458 - protein, 689 aa, Artificial Sequence
  Synthetic Polypeptide
MALPVTALLLPLALLLHAARPLFNQEVQIPLTESYCGPCPKNWICYKNNCYQFFDESKNWYESQASCMSQNASLLKVYSKEDQDLLKLVKSAHWMGLVHIPTNGSWQWEDGSILSPNLLTIIEMQKGDCALYASSFKGFIENCSTPNTYICMQRTVLEGQPKANPTVTLFPPSSEELQANKATLVCLISDFYPGAVTVAWKADGSPVKAGVETTKPSKQSNNKYAASSYLSLTPEQWKSHRSYSCQVTHEGSTVEKTVAPTECSPIKTDVITMDPKDNCSKDANDTLLLQLTNTSAYYMYLLLLLKSVVYFAIITCCLLRRTAFCCNGEKSRAKRSGSGATNFSLLKQAGDVEENPGPTSMDWIWRILFLVGAATGAHSFELFNQEVQIPLTESYCGPCPKNWICYKNNCYQFFDESKNWYESQASCMSQNASLLKVYSKEDQDLLKLVKSAHWMGLVHIPTNGSWQWEDGSILSPNLLTIIEMQKGDCALYASSFKGFIENCSTPNTYICMQRTVTRASTKGPSVFPLAPSSKSTSGGTAALGCLVKDYFPEPVTVSWNSGALTSGVHTFPAVLQSSGLYSLSSVVTVPSSSLGTQTYICNVNHKPSNTKVDKRVEPKSCEVKTDSTDHVKPKETENTKQPSKSCHKPKAIVHTEKVNMMSLTVLGLRMLFAKTVAVNFLLTAKLFFL

SEQ ID NO: 22459 - protein, 737 aa, Artificial Sequence
  Synthetic Polypeptide
MALPVTALLLPLALLLHAARPGMRTEDLPKAVVFLEPQWYRVLEKDSVTLKCQGAYSPEDNSTQWFHNESLISSQASSYFIDAATVDDSGEYRCQTNLSTLSDPVQLEVHIGWLLLQAPRWVFKEEDPIHLRCHSWKNTALHKVTYLQNGKGRKYFHHNSDFYIPKATLKDSGSYFCRGLVGSKNVSSETVNITITQGLAVSTISSFFPPGYQLEGQPKANPTVTLFPPSSEELQANKATLVCLISDFYPGAVTVAWKADGSPVKAGVETTKPSKQSNNKYAASSYLSLTPEQWKSHRSYSCQVTHEGSTVEKTVAPTECSPIKTDVITMDPKDNCSKDANDTLLLQLTNTSAYYMYLLLLLKSVVYFAIITCCLLRRTAFCCNGEKSRAKRSGSGATNFSLLKQAGDVEENPGPTSMDWIWRILFLVGAATGAHSFEVQLVESGGGVVQPGRSLRLSCAASGFSFSGYGMHWVRQAPGKGLEWVAYISYDGSNKYYADSVKGRFTISRDNSKNTLYLQMNSLRAEDTAVYYCAKDPAWGLRLGESSSYDFDIWGQGTMVTVSSTRASTKGPSVFPLAPSSKSTSGGTAALGCLVKDYFPEPVTVSWNSGALTSGVHTFPAVLQSSGLYSLSSVVTVPSSSLGTQTYICNVNHKPSNTKVDKRVEPKSCEVKTDSTDHVKPKETENTKQPSKSCHKPKAIVHTEKVNMMSLTVLGLRMLFAKTVAVNFLLTAKLFFL

SEQ ID NO: 22460 - protein, 803 aa, Artificial Sequence
  Synthetic Polypeptide
MALPVTALLLPLALLLHAARPGMRTEDLPKAVVFLEPQWYRVLEKDSVTLKCQGAYSPEDNSTQWFHNESLISSQASSYFIDAATVDDSGEYRCQTNLSTLSDPVQLEVHIGWLLLQAPRWVFKEEDPIHLRCHSWKNTALHKVTYLQNGKGRKYFHHNSDFYIPKATLKDSGSYFCRGLVGSKNVSSETVNITITQGLAVSTISSFFPPGYQLEGQPKANPTVTLFPPSSEELQANKATLVCLISDFYPGAVTVAWKADGSPVKAGVETTKPSKQSNNKYAASSYLSLTPEQWKSHRSYSCQVTHEGSTVEKTVAPTECSPIKTDVITMDPKDNCSKDANDTLLLQLTNTSAYYMYLLLLLKSVVYFAIITCCLLRRTAFCCNGEKSRAKRSGSGATNFSLLKQAGDVEENPGPTSMDWIWRILFLVGAATGAHSFEGMRTEDLPKAVVFLEPQWYRVLEKDSVTLKCQGAYSPEDNSTQWFHNESLISSQASSYFIDAATVDDSGEYRCQTNLSTLSDPVQLEVHIGWLLLQAPRWVFKEEDPIHLRCHSWKNTALHKVTYLQNGKGRKYFHHNSDFYIPKATLKDSGSYFCRGLVGSKNVSSETVNITITQGLAVSTISSFFPPGYQTRASTKGPSVFPLAPSSKSTSGGTAALGCLVKDYFPEPVTVSWNSGALTSGVHTFPAVLQSSGLYSLSSVVTVPSSSLGTQTYICNVNHKPSNTKVDKRVEPKSCEVKTDSTDHVKPKETENTKQPSKSCHKPKAIVHTEKVNMMSLTVLGLRMLFAKTVAVNFLLTAKLFFL

SEQ ID NO: 22461 - protein, 9 aa, Artificial Sequence
  Synthetic Polypeptide
GGGGGGGGG

SEQ ID NO: 22462 - protein, 863 aa, Artificial Sequence
  Synthetic Polypeptide
MALPVTALLLPLALLLHAARPQLQLQESGPGLVKPSETLSLTCTVSGDSISSGDYYWGWIRQPPGKGLEWIGHIYYSGVTYYNPSLKSRVTISVDTSRNQFSLKLSSVTAADTAVYYCTREDSSNWRSRGQGTLVTVSSLEIQNPDPAVYQLRDSKSSDKSVCLFTDFDSQTNVSQSKDSDVYITDKCVLDMRSMDFKSNSAVAWSNKSDFACANAFNNSIIPEDTFFPSSDVPCDVKLVEKSFETDTNLNFQNLSVIGFRILLLKVAGFNLLMTLRLWSSRAKRSGSGVKQTLNFDLLKLAGDVESNPGPTSMDWIWRILFLVGAATGAHSGPQVQLQESGGGLAQAGGSLRLSCAASGRTFSMGWFRQAPGKEREFVAAITYSGGSPYYASSVRGRFTISRDNAKNTVYLQMNSLKPEDTAVYYCAANPTYGSDWNAENWGQGTQVTVSSTREDLKNVFPPEVAVFEPSKAEIAHTQKATLVCLATGFYPDHVELSWWVNGKEVHSGVCTDPQPLKEQPALNDSRYCLSSRLRVSATFWQNPRNHFRCQVQFYGLSENDEWTQDRAKPVTQIVSAEAWGRADCGITSASYHQGVLSATILYEILLGKATLYAVLVSALVLMAMVKRKDSRGRAKRSGSGATNFSLLKQAGDVEENPGPSRGHMTEYKPTVRLATRDDVPRAVRTLAAAFADYPATRHTVDPDRHIERVTELQELFLTRVGLDIGKVWVADDGAAVAVWTTPESVEAGAVFAEIGPRMAELSGSRLAAQQQMEGLLAPHRPKEPAWFLATVGVSPDHQGKGLGSAVVLPGVEAAERAGVPAFLETSAPRNLPFYERLGFTVTADVEVPEGPRTWCMTRKPGA

SEQ ID NO: 22463 - protein, 1116 aa, Artificial Sequence
  Synthetic Polypeptide
MALPVTALLLPLALLLHAARPDIQMTQSPSSLSASVGDRVTITCKASDHINNWLAWYQQKPGQAPKLLIYGATTLETGVPSRFSGSGSGTDYTLTISSLQPEDFATYYCQQSWNTPWTFGQGTKLEIKRGGGGSGGGGSGGGGSQVQLQQPGAELVKPGASVKMSCKASGYAFSSYWINWMKQKPGQGLEWIGQIYPGDGDTNYNGKFKGRATLTADTSSSTAYMQLSSLTSEDSAVYFCARSITTVVGCAMDYWGQGTSVTVSSLEIQNPDPAVYQLRDSKSSDKSVCLFTDFDSQTNVSQSKDSDVYITDKCVLDMRSMDFKSNSAVAWSNKSDFACANAFNNSIIPEDTFFPSSDVPCDVKLVEKSFETDTNLNFQNLSVIGFRILLLKVAGFNLLMTLRLWSSRAKRSGSGVKQTLNFDLLKLAGDVESNPGPTSMDWIWRILFLVGAATGAHSFEDEIVLTQSPATLSLSPGERATLSCRASQSVSSYLAWYQQKPGQAPRLLIYDASNRATGIPARFSGSGSGTDFTLTISSLEPEDFAVYYCQQRSNWPITFGQGTRLEIKGGGGSGGGGSGGGGSEVQLVESGGGLVQPDRSLRLSCAASGFTFHDYAMHWVRQAPGKGLEWVSTISWNSGTIGYADSVKGRFTISRDNAKNSLYLQMNSLRAEDTALYYCAKDIQYGNYYYGMDVWGQGTTVTVSSTREDLKNVFPPEVAVFEPSKAEIAHTQKATLVCLATGFYPDHVELSWWVNGKEVHSGVCTDPQPLKEQPALNDSRYCLSSRLRVSATFWQNPRNHFRCQVQFYGLSENDEWTQDRAKPVTQIVSAEAWGRADCGITSASYHQGVLSATILYEILLGKATLYAVLVSALVLMAMVKRKDSRGRAKRSGSGATNFSLLKQAGDVEENPGPSRGHMTEYKPTVRLATRDDVPRAVRTLAAAFADYPATRHTVDPDRHIERVTELQELFLTRVGLDIGKVWVADDGAAVAVWTTPESVEAGAVFAEIGPRMAELSGSRLAAQQQMEGLLAPHRPKEPAWFLATVGVSPDHQGKGLGSAVVLPGVEAAERAGVPAFLETSAPRNLPFYERLGFTVTADVEVPEGPRTWCMTRKPGA

SEQ ID NO: 22464 - protein, 922 aa, Artificial Sequence
  Synthetic Polypeptide
MALPVTALLLPLALLLHAARPDIQMTQSPSSLSASVGDRVTITCKASDHINNWLAWYQQKPGQAPKLLIYGATTLETGVPSRFSGSGSGTDYTLTISSLQPEDFATYYCQQSWNTPWTFGQGTKLEIKRGGGGSGGGGSGGGGSQVQLQQPGAELVKPGASVKMSCKASGYAFSSYWINWMKQKPGQGLEWIGQIYPGDGDTNYNGKFKGRATLTADTSSSTAYMQLSSLTSEDSAVYFCARSITTVVGCAMDYWGQGTSVTVSSLEIQNPDPAVYQLRDSKSSDKSVCLFTDFDSQTNVSQSKDSDVYITDKCVLDMRSMDFKSNSAVAWSNKSDFACANAFNNSIIPEDTFFPSSDVPCDVKLVEKSFETDTNLNFQNLSVIGFRILLLKVAGFNLLMTLRLWSSRAKRSGSGVKQTLNFDLLKLAGDVESNPGPTSMDWIWRILFLVGAATGAHSFEMDPDLEIRAAFLRQRNTALRTEVAELEQEVQRLENEVSQYETRYGPLGGGKTREDLKNVFPPEVAVFEPSKAEIAHTQKATLVCLATGFYPDHVELSWWVNGKEVHSGVCTDPQPLKEQPALNDSRYCLSSRLRVSATFWQNPRNHFRCQVQFYGLSENDEWTQDRAKPVTQIVSAEAWGRADCGITSASYHQGVLSATILYEILLGKATLYAVLVSALVLMAMVKRKDSRGRAKRSGSGATNFSLLKQAGDVEENPGPSRGHMTEYKPTVRLATRDDVPRAVRTLAAAFADYPATRHTVDPDRHIERVTELQELFLTRVGLDIGKVWVADDGAAVAVWTTPESVEAGAVFAEIGPRMAELSGSRLAAQQQMEGLLAPHRPKEPAWFLATVGVSPDHQGKGLGSAVVLPGVEAAERAGVPAFLETSAPRNLPFYERLGFTVTADVEVPEGPRTWCMTRKPGA

SEQ ID NO: 22465 - protein, 731 aa, Artificial Sequence
  Synthetic Polypeptide
MALPVTALLLPLALLLHAARPEVQLVESGGGLVQPGGSLRLSCAASGFASDYYIIGWFRQAPGKEREGVSCISSRYANTNYADSVKGRFTISRDNAKNTVYLQMNSLKPEDTAVYYCAADTRRYTCPDIATMHRNFDSWGQGTLVTVSSGGGSGGGSEVQLVESGGSLVQPGGSLRLSCAASGFTFDDYAMSWVRQVPGKGLEWVSSINWSGTHTDYADSVKGRFTISRNNANNTLYLQMNSLKSEDTAVYYCAKNWRDAGTTWFEKSGSAGQGTQVTVSSGTGGGGSGGGGSGGGGSEFDIQMTQSPSSLSASVGDRVTITCKASDHINNWLAWYQQKPGQAPKLLIYGATTLETGVPSRFSGSGSGTDYTLTISSLQPEDFATYYCQQSWNTPWTFGQGTKLEIKRGGGGSGGGGSGGGGSQVQLQQPGAELVKPGASVKMSCKASGYAFSSYWINWMKQKPGQGLEWIGQIYPGDGDTNYNGKFKGRATLTADTSSSTAYMQLSSLTSEDSAVYFCARSITTVVGCAMDYWGQGTSVTVSSTRDGNEEMGGITQTPYKVSISGTTVILTCPQYPGSEILWQHNDKNIGGDEDDKNIGSDEDHLSLKEFSELEQSGYYVCYPRGSKPEDANFYLYLRARVCENCMEMDVMSVATIVIVDICITGGLLLLVYYWSKNRKAKAKPVTRGAGAGGRQRGQNKERPPPVPNPDYEPIRKGQRDLYSGLNQRRI

SEQ ID NO: 22466 - protein, 782 aa, Artificial Sequence
  Synthetic Polypeptide
MALPVTALLLPLALLLHAARPEVQLVESGGGLVQPGGSLRLSCAASGFASDYYIIGWFRQAPGKEREGVSCISSRYANTNYADSVKGRFTISRDNAKNTVYLQMNSLKPEDTAVYYCAADTRRYTCPDIATMHRNFDSWGQGTLVTVSSGGGSGGGSEVQLVESGGSLVQPGGSLRLSCAASGFTFDDYAMSWVRQVPGKGLEWVSSINWSGTHTDYADSVKGRFTISRNNANNTLYLQMNSLKSEDTAVYYCAKNWRDAGTTWFEKSGSAGQGTQVTVSSGTGGGGSGGGGSGGGGSEFDIQMTQSPSSLSASVGDRVTITCKASDHINNWLAWYQQKPGQAPKLLIYGATTLETGVPSRFSGSGSGTDYTLTISSLQPEDFATYYCQQSWNTPWTFGQGTKLEIKRGGGGSGGGGSGGGGSQVQLQQPGAELVKPGASVKMSCKASGYAFSSYWINWMKQKPGQGLEWIGQIYPGDGDTNYNGKFKGRATLTADTSSSTAYMQLSSLTSEDSAVYFCARSITTVVGCAMDYWGQGTSVTVSSTREQKLISEEDLAKPTTTPAPRPPTPAPTIASQPLSLRPEACRPAAGGAVHTRGLDFACDIYIWAPLAGTCGVLLLSLVITLYCKRGRKKLLYIFKQPFMRPVQTTQEEDGCSCRFPEEEEGGCELRVKFSRSADAPAYQQGQNQLYNELNLGRREEYDVLDKRRGRDPEMGGKPRRKNPQEGLYNELQKDKMAEAYSEIGMKGERRRGKGHDGLYQGLSTATKDTYDALHMQALPPR

SEQ ID NO: 22467 - protein, 1048 aa, Artificial Sequence
  Synthetic Polypeptide
MALPVTALLLPLALLLHAARPEVQLVESGGGLVQPGGSLRLSCAASGFASDYYIIGWFRQAPGKEREGVSCISSRYANTNYADSVKGRFTISRDNAKNTVYLQMNSLKPEDTAVYYCAADTRRYTCPDIATMHRNFDSWGQGTLVTVSSGGGSGGGSEVQLVESGGSLVQPGGSLRLSCAASGFTFDDYAMSWVRQVPGKGLEWVSSINWSGTHTDYADSVKGRFTISRNNANNTLYLQMNSLKSEDTAVYYCAKNWRDAGTTWFEKSGSAGQGTQVTVSSGTGGGGSGGGGSGGGGSEFDIQMTQSPSSLSASVGDRVTITCKASDHINNWLAWYQQKPGQAPKLLIYGATTLETGVPSRFSGSGSGTDYTLTISSLQPEDFATYYCQQSWNTPWTFGQGTKLEIKRLEDLKNVFPPEVAVFEPSEAEISHTQKATLVCLATGFYPDHVELSWWVNGKEVHSGVCTDPQPLKEQPALNDSRYCLSSRLRVSATFWQNPRNHFRCQVQFYGLSENDEWTQDRAKPVTQIVSAEAWGRADCGFTSESYQQGVLSATILYEILLGKATLYAVLVSALVLMAMVKRKDSRGRAKRSGSGATNFSLLKQAGDVEENPGPTSMDWIWRILFLVGAATGAHSGPEVQLVESGGGLVQPGGSLRLSCAASGFASDYYIIGWFRQAPGKEREGVSCISSRYANTNYADSVKGRFTISRDNAKNTVYLQMNSLKPEDTAVYYCAADTRRYTCPDIATMHRNFDSWGQGTLVTVSSGSGGGGSGGGGSGGGGSFEQVQLQQPGAELVKPGASVKMSCKASGYAFSSYWINWMKQKPGQGLEWIGQIYPGDGDTNYNGKFKGRATLTADTSSSTAYMQLSSLTSEDSAVYFCARSITTVVGCAMDYWGQGTSVTVSSTRIQNPDPAVYQLRDSKSSDKSVCLFTDFDSQTNVSQSKDSDVYITDKCVLDMRSMDFKSNSAVAWSNKSDFACANAFNNSIIPEDTFFPSPESSCDVKLVEKSFETDTNLNFQNLSVIGFRILLLKVAGFNLLMTLRLWSS

SEQ ID NO: 22468 - protein, 1074 aa, Artificial Sequence
  Synthetic Polypeptide
MALPVTALLLPLALLLHAARPEVQLVESGGGLVQPGGSLRLSCAASGFASDYYIIGWFRQAPGKEREGVSCISSRYANTNYADSVKGRFTISRDNAKNTVYLQMNSLKPEDTAVYYCAADTRRYTCPDIATMHRNFDSWGQGTLVTVSSGGGSGGGSEVQLVESGGSLVQPGGSLRLSCAASGFTFDDYAMSWVRQVPGKGLEWVSSINWSGTHTDYADSVKGRFTISRNNANNTLYLQMNSLKSEDTAVYYCAKNWRDAGTTWFEKSGSAGQGTQVTVSSGTGGGGSGGGGSGGGGSEFDIQMTQSPSSLSASVGDRVTITCKASDHINNWLAWYQQKPGQAPKLLIYGATTLETGVPSRFSGSGSGTDYTLTISSLQPEDFATYYCQQSWNTPWTFGQGTKLEIKRLEGQPKANPTVTLFPPSSEELQANKATLVCLISDFYPGAVTVAWKADGSPVKAGVETTKPSKQSNNKYAASSYLSLTPEQWKSHRSYSCQVTHEGSTVEKTVAPTECSPIKTDVITMDPKDNCSKDANDTLLLQLTNTSAYYMYLLLLLKSVVYFAIITCCLLRRTAFCCNGEKSRAKRSGSGATNFSLLKQAGDVEENPGPTSMDWIWRILFLVGAATGAHSGPEVQLVESGGGLVQPGGSLRLSCAASGFASDYYIIGWFRQAPGKEREGVSCISSRYANTNYADSVKGRFTISRDNAKNTVYLQMNSLKPEDTAVYYCAADTRRYTCPDIATMHRNFDSWGQGTLVTVSSGSGGGGSGGGGSGGGGSFEQVQLQQPGAELVKPGASVKMSCKASGYAFSSYWINWMKQKPGQGLEWIGQIYPGDGDTNYNGKFKGRATLTADTSSSTAYMQLSSLTSEDSAVYFCARSITTVVGCAMDYWGQGTSVTVSSTRASTKGPSVFPLAPSSKSTSGGTAALGCLVKDYFPEPVTVSWNSGALTSGVHTFPAVLQSSGLYSLSSVVTVPSSSLGTQTYICNVNHKPSNTKVDKRVEPKSCEVKTDSTDHVKPKETENTKQPSKSCHKPKAIVHTEKVNMMSLTVLGLRMLFAKTVAVNFLLTAKLFFL

SEQ ID NO: 22469 - protein, 1052 aa, Artificial Sequence
  Synthetic Polypeptide
MALPVTALLLPLALLLHAARPEVQLVESGGGLVQPGGSLRLSCAASGFASDYYIIGWFRQAPGKEREGVSCISSRYANTNYADSVKGRFTISRDNAKNTVYLQMNSLKPEDTAVYYCAADTRRYTCPDIATMHRNFDSWGQGTLVTVSSGGGSGGGSEVQLVESGGSLVQPGGSLRLSCAASGFTFDDYAMSWVRQVPGKGLEWVSSINWSGTHTDYADSVKGRFTISRNNANNTLYLQMNSLKSEDTAVYYCAKNWRDAGTTWFEKSGSAGQGTQVTVSSGTGGGGSGGGGSGGGGSEFDIQMTQSPSSLSASVGDRVTITCKASDHINNWLAWYQQKPGQAPKLLIYGATTLETGVPSRFSGSGSGTDYTLTISSLQPEDFATYYCQQSWNTPWTFGQGTKLEIKRLEGQPKANPTVTLFPPSSEELQANKATLVCLISDFYPGAVTVAWKADGSPVKAGVETTKPSKQSNNKYAASSYLSLTPEQWKSHRSYSCQVTHEGSTVEKTVAPTECSGRADCGFTSESYQQGVLSATILYEILLGKATLYAVLVSALVLMAMVKRKDSRGRAKRSGSGATNFSLLKQAGDVEENPGPTSMDWIWRILFLVGAATGAHSGPEVQLVESGGGLVQPGGSLRLSCAASGFASDYYIIGWFRQAPGKEREGVSCISSRYANTNYADSVKGRFTISRDNAKNTVYLQMNSLKPEDTAVYYCAADTRRYTCPDIATMHRNFDSWGQGTLVTVSSGSGGGGSGGGGSGGGGSFEQVQLQQPGAELVKPGASVKMSCKASGYAFSSYWINWMKQKPGQGLEWIGQIYPGDGDTNYNGKFKGRATLTADTSSSTAYMQLSSLTSEDSAVYFCARSITTVVGCAMDYWGQGTSVTVSSTRASTKGPSVFPLAPSSKSTSGGTAALGCLVKDYFPEPVTVSWNSGALTSGVHTFPAVLQSSGLYSLSSVVTVPSSSLGTQTYICNVNHKPSNTKVDKRVEPKSCIPEDTFFPSPESSCDVKLVEKSFETDTNLNFQNLSVIGFRILLLKVAGFNLLMTLRLWSS

SEQ ID NO: 22470 - protein, 785 aa, Artificial Sequence
  Synthetic Polypeptide
MALPVTALLLPLALLLHAARPEVQLVESGGGLVQPGGSLRLSCAASGFASDYYIIGWFRQAPGKEREGVSCISSRYANTNYADSVKGRFTISRDNAKNTVYLQMNSLKPEDTAVYYCAADTRRYTCPDIATMHRNFDSWGQGTLVTVSSGGGSGGGSEVQLVESGGSLVQPGGSLRLSCAASGFTFDDYAMSWVRQVPGKGLEWVSSINWSGTHTDYADSVKGRFTISRNNANNTLYLQMNSLKSEDTAVYYCAKNWRDAGTTWFEKSGSAGQGTQVTVSSLEGQPKANPTVTLFPPSSEELQANKATLVCLISDFYPGAVTVAWKADGSPVKAGVETTKPSKQSNNKYAASSYLSLTPEQWKSHRSYSCQVTHEGSTVEKTVAPTECSGRADCGFTSESYQQGVLSATILYEILLGKATLYAVLVSALVLMAMVKRKDSRGRAKRSGSGATNFSLLKQAGDVEENPGPTSMDWIWRILFLVGAATGAHSGPEVQLVESGGGLVQPGGSLRLSCAASGFASDYYIIGWFRQAPGKEREGVSCISSRYANTNYADSVKGRFTISRDNAKNTVYLQMNSLKPEDTAVYYCAADTRRYTCPDIATMHRNFDSWGQGTLVTVSSTRASTKGPSVFPLAPSSKSTSGGTAALGCLVKDYFPEPVTVSWNSGALTSGVHTFPAVLQSSGLYSLSSVVTVPSSSLGTQTYICNVNHKPSNTKVDKRVEPKSCIPEDTFFPSPESSCDVKLVEKSFETDTNLNFQNLSVIGFRILLLKVAGFNLLMTLRLWSS

SEQ ID NO: 22471 - protein, 731 aa, Artificial Sequence; identical to SEQ ID NO: 22465
  Synthetic Polypeptide

SEQ ID NO: 22472 - protein, 696 aa, Artificial Sequence
  Synthetic Polypeptide
MALPVTALLLPLALLLHAARPEVQLVESGGGLVQPGGSLRLSCAASGFASDYYIIGWFRQAPGKEREGVSCISSRYANTNYADSVKGRFTISRDNAKNTVYLQMNSLKPEDTAVYYCAADTRRYTCPDIATMHRNFDSWGQGTLVTVSSGGGSGGGSEVQLVESGGSLVQPGGSLRLSCAASGFTFDDYAMSWVRQVPGKGLEWVSSINWSGTHTDYADSVKGRFTISRNNANNTLYLQMNSLKSEDTAVYYCAKNWRDAGTTWFEKSGSAGQGTQVTVSSGTGGGGSGGGGSGGGGSEFDIQMTQSPSSLSASVGDRVTITCKASDHINNWLAWYQQKPGQAPKLLIYGATTLETGVPSRFSGSGSGTDYTLTISSLQPEDFATYYCQQSWNTPWTFGQGTKLEIKRGGGGSGGGGSGGGGSQVQLQQPGAELVKPGASVKMSCKASGYAFSSYWINWMKQKPGQGLEWIGQIYPGDGDTNYNGKFKGRATLTADTSSSTAYMQLSSLTSEDSAVYFCARSITTVVGCAMDYWGQGTSVTVSSTRFKIPIEELEDRVFVNCNTSITWVEGTVGTLLSDITRLDLGKRILDPRGIYRCNGTDIYKDKESTVQVHYRMCQSCVELDPATVAGIIVTDVIATLLLALGVFCFAGHETGRLSGAADTQALLRNDQVYQPLRDRDDAQYSHLGGNWARNK

SEQ ID NO: 22473 - protein, 706 aa, Artificial Sequence
  Synthetic Polypeptide
MALPVTALLLPLALLLHAARPEVQLVESGGGLVQPGGSLRLSCAASGFASDYYIIGWFRQAPGKEREGVSCISSRYANTNYADSVKGRFTISRDNAKNTVYLQMNSLKPEDTAVYYCAADTRRYTCPDIATMHRNFDSWGQGTLVTVSSGGGSGGGSEVQLVESGGSLVQPGGSLRLSCAASGFTFDDYAMSWVRQVPGKGLEWVSSINWSGTHTDYADSVKGRFTISRNNANNTLYLQMNSLKSEDTAVYYCAKNWRDAGTTWFEKSGSAGQGTQVTVSSGTGGGGSGGGGSGGGGSEFDIQMTQSPSSLSASVGDRVTITCKASDHINNWLAWYQQKPGQAPKLLIYGATTLETGVPSRFSGSGSGTDYTLTISSLQPEDFATYYCQQSWNTPWTFGQGTKLEIKRGGGGSGGGGSGGGGSQVQLQQPGAELVKPGASVKMSCKASGYAFSSYWINWMKQKPGQGLEWIGQIYPGDGDTNYNGKFKGRATLTADTSSSTAYMQLSSLTSEDSAVYFCARSITTVVGCAMDYWGQGTSVTVSSTRQSIKGNHLVKVYDYQEDGSVLLTCDAEAKNITWFKDGKMIGFLTEDKKKWNLGSNAKDPRGMYQCKGSQNKSKPLQVYYRMCQNCIELNAATISGFLFAEIVSIFVLAVGVYFIAGQDGVRQSRASDKQTLLPNDQLYQPLKDREDDQYSHLQGNQLRRN

SEQ ID NO: 22474 - protein, 956 aa, Artificial Sequence
  Synthetic Polypeptide
MALPVTALLLPLALLLHAARPMCMPCFTTDHQMARKCDDCCGGKGRGKCYGPQCLCRGGGSGGGSEVQLVESGGSLVQPGGSLRLSCAASGFTFDDYAMSWVRQVPGKGLEWVSSINWSGTHTDYADSVKGRFTISRNNANNTLYLQMNSLKSEDTAVYYCAKNWRDAGTTWFEKSGSAGQGTQVTVSSGTGGGGSGGGGSGGGGSEFDIQMTQSPSSLSASVGDRVTITCKASDHINNWLAWYQQKPGQAPKLLIYGATTLETGVPSRFSGSGSGTDYTLTISSLQPEDFATYYCQQSWNTPWTFGQGTKLEIKRLEDLKNVFPPEVAVFEPSEAEISHTQKATLVCLATGFYPDHVELSWWVNGKEVHSGVCTDPQPLKEQPALNDSRYCLSSRLRVSATFWQNPRNHFRCQVQFYGLSENDEWTQDRAKPVTQIVSAEAWGRADCGFTSESYQQGVLSATILYEILLGKATLYAVLVSALVLMAMVKRKDSRGRAKRSGSGATNFSLLKQAGDVEENPGPTSMDWIWRILFLVGAATGAHSGPEVQLVESGGGLVQPGGSLRLSCAASGFASDYYIIGWFRQAPGKEREGVSCISSRYANTNYADSVKGRFTISRDNAKNTVYLQMNSLKPEDTAVYYCAADTRRYTCPDIATMHRNFDSWGQGTLVTVSSGSGGGGSGGGGSGGGGSFEQVQLQQPGAELVKPGASVKMSCKASGYAFSSYWINWMKQKPGQGLEWIGQIYPGDGDTNYNGKFKGRATLTADTSSSTAYMQLSSLTSEDSAVYFCARSITTVVGCAMDYWGQGTSVTVSSTRIQNPDPAVYQLRDSKSSDKSVCLFTDFDSQTNVSQSKDSDVYITDKCVLDMRSMDFKSNSAVAWSNKSDFACANAFNNSIIPEDTFFPSPESSCDVKLVEKSFETDTNLNFQNLSVIGFRILLLKVAGFNLLMTLRLWSS

SEQ ID NO: 22475 - protein, 982 aa, Artificial Sequence
  Synthetic Polypeptide
MALPVTALLLPLALLLHAARPMCMPCFTTDHQMARKCDDCCGGKGRGKCYGPQCLCRGGGSGGGSEVQLVESGGSLVQPGGSLRLSCAASGFTFDDYAMSWVRQVPGKGLEWVSSINWSGTHTDYADSVKGRFTISRNNANNTLYLQMNSLKSEDTAVYYCAKNWRDAGTTWFEKSGSAGQGTQVTVSSGTGGGGSGGGGSGGGGSEFDIQMTQSPSSLSASVGDRVTITCKASDHINNWLAWYQQKPGQAPKLLIYGATTLETGVPSRFSGSGSGTDYTLTISSLQPEDFATYYCQQSWNTPWTFGQGTKLEIKRLEGQPKANPTVTLFPPSSEELQANKATLVCLISDFYPGAVTVAWKADGSPVKAGVETTKPSKQSNNKYAASSYLSLTPEQWKSHRSYSCQVTHEGSTVEKTVAPTECSPIKTDVITMDPKDNCSKDANDTLLLQLTNTSAYYMYLLLLLKSVVYFAIITCCLLRRTAFCCNGEKSRAKRSGSGATNFSLLKQAGDVEENPGPTSMDWIWRILFLVGAATGAHSGPEVQLVESGGGLVQPGGSLRLSCAASGFASDYYIIGWFRQAPGKEREGVSCISSRYANTNYADSVKGRFTISRDNAKNTVYLQMNSLKPEDTAVYYCAADTRRYTCPDIATMHRNFDSWGQGTLVTVSSGSGGGGSGGGGSGGGGSFEQVQLQQPGAELVKPGASVKMSCKASGYAFSSYWINWMKQKPGQGLEWIGQIYPGDGDTNYNGKFKGRATLTADTSSSTAYMQLSSLTSEDSAVYFCARSITTVVGCAMDYWGQGTSVTVSSTRASTKGPSVFPLAPSSKSTSGGTAALGCLVKDYFPEPVTVSWNSGALTSGVHTFPAVLQSSGLYSLSSVVTVPSSSLGTQTYICNVNHKPSNTKVDKRVEPKSCEVKTDSTDHVKPKETENTKQPSKSCHKPKAIVHTEKVNMMSLTVLGLRMLFAKTVAVNFLLTAKLFFL

SEQ ID NO: 22476 - protein, 960 aa, Artificial Sequence
  Synthetic Polypeptide
MALPVTALLLPLALLLHAARPMCMPCFTTDHQMARKCDDCCGGKGRGKCYGPQCLCRGGGSGGGSEVQLVESGGSLVQPGGSLRLSCAASGFTFDDYAMSWVRQVPGKGLEWVSSINWSGTHTDYADSVKGRFTISRNNANNTLYLQMNSLKSEDTAVYYCAKNWRDAGTTWFEKSGSAGQGTQVTVSSGTGGGGSGGGGSGGGGSEFDIQMTQSPSSLSASVGDRVTITCKASDHINNWLAWYQQKPGQAPKLLIYGATTLETGVPSRFSGSGSGTDYTLTISSLQPEDFATYYCQQSWNTPWTFGQGTKLEIKRLEGQPKANPTVTLFPPSSEELQANKATLVCLISDFYPGAVTVAWKADGSPVKAGVETTKPSKQSNNKYAASSYLSLTPEQWKSHRSYSCQVTHEGSTVEKTVAPTECSGRADCGFTSESYQQGVLSATILYEILLGKATLYAVLVSALVLMAMVKRKDSRGRAKRSGSGATNFSLLKQAGDVEENPGPTSMDWIWRILFLVGAATGAHSGPEVQLVESGGGLVQPGGSLRLSCAASGFASDYYIIGWFRQAPGKEREGVSCISSRYANTNYADSVKGRFTISRDNAKNTVYLQMNSLKPEDTAVYYCAADTRRYTCPDIATMHRNFDSWGQGTLVTVSSGSGGGGSGGGGSGGGGSFEQVQLQQPGAELVKPGASVKMSCKASGYAFSSYWINWMKQKPGQGLEWIGQIYPGDGDTNYNGKFKGRATLTADTSSSTAYMQLSSLTSEDSAVYFCARSITTVVGCAMDYWGQGTSVTVSSTRASTKGPSVFPLAPSSKSTSGGTAALGCLVKDYFPEPVTVSWNSGALTSGVHTFPAVLQSSGLYSLSSVVTVPSSSLGTQTYICNVNHKPSNTKVDKRVEPKSCIPEDTFFPSPESSCDVKLVEKSFETDTNLNFQNLSVIGFRILLLKVAGFNLLMTLRLWSS

SEQ ID NO: 22477 - protein, 693 aa, Artificial Sequence
  Synthetic Polypeptide
MALPVTALLLPLALLLHAARPMCMPCFTTDHQMARKCDDCCGGKGRGKCYGPQCLCRGGGSGGGSEVQLVESGGSLVQPGGSLRLSCAASGFTFDDYAMSWVRQVPGKGLEWVSSINWSGTHTDYADSVKGRFTISRNNANNTLYLQMNSLKSEDTAVYYCAKNWRDAGTTWFEKSGSAGQGTQVTVSSLEGQPKANPTVTLFPPSSEELQANKATLVCLISDFYPGAVTVAWKADGSPVKAGVETTKPSKQSNNKYAASSYLSLTPEQWKSHRSYSCQVTHEGSTVEKTVAPTECSGRADCGFTSESYQQGVLSATILYEILLGKATLYAVLVSALVLMAMVKRKDSRGRAKRSGSGATNFSLLKQAGDVEENPGPTSMDWIWRILFLVGAATGAHSGPEVQLVESGGGLVQPGGSLRLSCAASGFASDYYIIGWFRQAPGKEREGVSCISSRYANTNYADSVKGRFTISRDNAKNTVYLQMNSLKPEDTAVYYCAADTRRYTCPDIATMHRNFDSWGQGTLVTVSSTRASTKGPSVFPLAPSSKSTSGGTAALGCLVKDYFPEPVTVSWNSGALTSGVHTFPAVLQSSGLYSLSSVVTVPSSSLGTQTYICNVNHKPSNTKVDKRVEPKSCIPEDTFFPSPESSCDVKLVEKSFETDTNLNFQNLSVIGFRILLLKVAGFNLLMTLRLWSS

SEQ ID NO: 22478 - protein, 782 aa, Artificial Sequence
  Synthetic Polypeptide
MALPVTALLLPLALLLHAARPMCMPCFTTDHQMARKCDDCCGGKGRGKCYGPQCLCRGGGGSGGGGSGGGGSEVQLVESGGGLVQPGGSLRLSCAASGFASDYYIIGWFRQAPGKEREGVSCISSRYANTNYADSVKGRFTISRDNAKNTVYLQMNSLKPEDTAVYYCAADTRRYTCPDIATMHRNFDSWGQGTLVTVSSGGGSGGGSEVQLVESGGSLVQPGGSLRLSCAASGFTFDDYAMSWVRQVPGKGLEWVSSINWSGTHTDYADSVKGRFTISRNNANNTLYLQMNSLKSEDTAVYYCAKNWRDAGTTWFEKSGSAGQGTQVTVSSGTGGGGSGGGGSGGGGSEFDIQMTQSPSSLSASVGDRVTITCKASDHINNWLAWYQQKPGQAPKLLIYGATTLETGVPSRFSGSGSGTDYTLTISSLQPEDFATYYCQQSWNTPWTFGQGTKLEIKRGGGGSGGGGSGGGGSQVQLQQPGAELVKPGASVKMSCKASGYAFSSYWINWMKQKPGQGLEWIGQIYPGDGDTNYNGKFKGRATLTADTSSSTAYMQLSSLTSEDSAVYFCARSITTVVGCAMDYWGQGTSVTVSSTRDGNEEMGGITQTPYKVSISGTTVILTCPQYPGSEILWQHNDKNIGGDEDDKNIGSDEDHLSLKEFSELEQSGYYVCYPRGSKPEDANFYLYLRARVCENCMEMDVMSVATIVIVDICITGGLLLLVYYWSKNRKAKAKPVTRGAGAGGRQRGQNKERPPPVPNPDYEPIRKGQRDLYSGLNQRRI

SEQ ID NO: 22479 - protein, 764 aa, Artificial Sequence
  Synthetic Polypeptide
MALPVTALLLPLALLLHAARPEVQLVESGGGLVQAGGSLRLSCAASGSVFSGNVMGWYRRQAPGKEREWVAAIASGGSIYYRDSVKGRFTISRDNAKNTVYLQMNSLKPEDTAVYYCNSHPPTLPYWGLGTQVTVSSGTGGGGSGGGGSGGGGSEFDDIVMTQSPDSLTVSLGERTTINCKSSQSVLDSSKNKNSLAWYQQKPGQPPKLLLSWASTRESGIPDRFSGSGSGTDFTLTIDSLQPEDSATYYCQQSAHFPITFGQGTRLEIKLEDLKNVFPPEVAVFEPSEAEISHTQKATLVCLATGFYPDHVELSWWVNGKEVHSGVCTDPQPLKEQPALNDSRYCLSSRLRVSATFWQNPRNHFRCQVQFYGLSENDEWTQDRAKPVTQIVSAEAWGRADCGFTSESYQQGVLSATILYEILLGKATLYAVLVSALVLMAMVKRKDSRGRAKRSGSGATNFSLLKQAGDVEENPGPTSMDWIWRILFLVGAATGAHSFEQVQLVQSGAEVKKPGASVKVSCKASGYTFTNYGMNWVKQAPGQGLKWMGWINTYTGEPTYADDFKGRVTMTSDTSTSTAYLELHNLRSDDTAVYYCARWSWSDGYYVYFDYWGQGTTVTVSSTRIQNPDPAVYQLRDSKSSDKSVCLFTDFDSQTNVSQSKDSDVYITDKCVLDMRSMDFKSNSAVAWSNKSDFACANAFNNSIIPEDTFFPSPESSCDVKLVEKSFETDTNLNFQNLSVIGFRILLLKVAGFNLLMTLRLWSS

SEQ ID NO: 22480 - protein, 760 aa, Artificial Sequence
  Synthetic Polypeptide
MALPVTALLLPLALLLHAARPEVQLVESGGGLVQAGGSLRLSCAASGSVFSGNVMGWYRRQAPGKEREWVAAIASGGSIYYRDSVKGRFTISRDNAKNTVYLQMNSLKPEDTAVYYCNSHPPTLPYWGLGTQVTVSSGTGGGGSGGGGSGGGGSEFDEIVLTQSPGSLAVSPGERVTMSCKSSQSVFFSSSQKNYLAWYQQIPGQSPRLLIYWASTRESGVPDRFTGSGSGTDFTLTISSVQPEDLAIYYCHQYLSSRTFGQGTKLEIKRLEDLKNVFPPEVAVFEPSEAEISHTQKATLVCLATGFYPDHVELSWWVNGKEVHSGVCTDPQPLKEQPALNDSRYCLSSRLRVSATFWQNPRNHFRCQVQFYGLSENDEWTQDRAKPVTQIVSAEAWGRADCGFTSESYQQGVLSATILYEILLGKATLYAVLVSALVLMAMVKRKDSRGRAKRSGSGATNFSLLKQAGDVEENPGPTSMDWIWRILFLVGAATGAHSFEQVQLQQPGAEVVKPGASVKMSCKASGYTFTSYYIHWIKQTPGQGLEWVGVIYPGNDDISYNQKFQGKATLTADKSSTTAYMQLSSLTSEDSAVYYCAREVRLRYFDVWGQGTTVTVSSTRIQNPDPAVYQLRDSKSSDKSVCLFTDFDSQTNVSQSKDSDVYITDKCVLDMRSMDFKSNSAVAWSNKSDFACANAFNNSIIPEDTFFPSPESSCDVKLVEKSFETDTNLNFQNLSVIGFRILLLKVAGFNLLMTLRLWSS

SEQ ID NO: 22481 - protein, 790 aa, Artificial Sequence
  Synthetic Polypeptide
MALPVTALLLPLALLLHAARPEVQLVESGGGLVQAGGSLRLSCAASGSVFSGNVMGWYRRQAPGKEREWVAAIASGGSIYYRDSVKGRFTISRDNAKNTVYLQMNSLKPEDTAVYYCNSHPPTLPYWGLGTQVTVSSGTGGGGSGGGGSGGGGSEFDDIVMTQSPDSLTVSLGERTTINCKSSQSVLDSSKNKNSLAWYQQKPGQPPKLLLSWASTRESGIPDRFSGSGSGTDFTLTIDSLQPEDSATYYCQQSAHFPITFGQGTRLEIKLEGQPKANPTVTLFPPSSEELQANKATLVCLISDFYPGAVTVAWKADGSPVKAGVETTKPSKQSNNKYAASSYLSLTPEQWKSHRSYSCQVTHEGSTVEKTVAPTECSPIKTDVITMDPKDNCSKDANDTLLLQLTNTSAYYMYLLLLLKSVVYFAIITCCLLRRTAFCCNGEKSRAKRSGSGATNFSLLKQAGDVEENPGPTSMDWIWRILFLVGAATGAHSFEQVQLVQSGAEVKKPGASVKVSCKASGYTFTNYGMNWVKQAPGQGLKWMGWINTYTGEPTYADDFKGRVTMTSDTSTSTAYLELHNLRSDDTAVYYCARWSWSDGYYVYFDYWGQGTTVTVSSTRASTKGPSVFPLAPSSKSTSGGTAALGCLVKDYFPEPVTVSWNSGALTSGVHTFPAVLQSSGLYSLSSVVTVPSSSLGTQTYICNVNHKPSNTKVDKRVEPKSCEVKTDSTDHVKPKETENTKQPSKSCHKPKAIVHTEKVNMMSLTVLGLRMLFAKTVAVNFLLTAKLFFL

SEQ ID NO: 22482 - protein, 786 aa, Artificial Sequence
  Synthetic Polypeptide
MALPVTALLLPLALLLHAARPEVQLVESGGGLVQAGGSLRLSCAASGSVFSGNVMGWYRRQAPGKEREWVAAIASGGSIYYRDSVKGRFTISRDNAKNTVYLQMNSLKPEDTAVYYCNSHPPTLPYWGLGTQVTVSSGTGGGGSGGGGSGGGGSEFDEIVLTQSPGSLAVSPGERVTMSCKSSQSVFFSSSQKNYLAWYQQIPGQSPRLLIYWASTRESGVPDRFTGSGSGTDFTLTISSVQPEDLAIYYCHQYLSSRTFGQGTKLEIKRLEGQPKANPTVTLFPPSSEELQANKATLVCLISDFYPGAVTVAWKADGSPVKAGVETTKPSKQSNNKYAASSYLSLTPEQWKSHRSYSCQVTHEGSTVEKTVAPTECSPIKTDVITMDPKDNCSKDANDTLLLQLTNTSAYYMYLLLLLKSVVYFAIITCCLLRRTAFCCNGEKSRAKRSGSGATNFSLLKQAGDVEENPGPTSMDWIWRILFLVGAATGAHSFEQVQLQQPGAEVVKPGASVKMSCKASGYTFTSYYIHWIKQTPGQGLEWVGVIYPGNDDISYNQKFQGKATLTADKSSTTAYMQLSSLTSEDSAVYYCAREVRLRYFDVWGQGTTVTVSSTRASTKGPSVFPLAPSSKSTSGGTAALGCLVKDYFPEPVTVSWNSGALTSGVHTFPAVLQSSGLYSLSSVVTVPSSSLGTQTYICNVNHKPSNTKVDKRVEPKSCEVKTDSTDHVKPKETENTKQPSKSCHKPKAIVHTEKVNMMSLTVLGLRMLFAKTVAVNFLLTAKLFFL

SEQ ID NO: 22483 - protein, 771 aa, Artificial Sequence
  Synthetic Polypeptide
MALPVTALLLPLALLLHAARPEVQLVESGGGLVQAGGSLRLSCAASGSVFSGNVMGWYRRQAPGKEREWVAAIASGGSIYYRDSVKGRFTISRDNAKNTVYLQMNSLKPEDTAVYYCNSHPPTLPYWGLGTQVTVSSGTGGGGSGGGGSGGGGSEFDDIVMTQSPDSLTVSLGERTTINCKSSQSVLDSSKNKNSLAWYQQKPGQPPKLLLSWASTRESGIPDRFSGSGSGTDFTLTIDSLQPEDSATYYCQQSAHFPITFGQGTRLEIKLEGQPKANPTVTLFPPSSEELQANKATLVCLISDFYPGAVTVAWKADGSPVKAGVETTKPSKQSNNKYAASSYLSLTPEQWKSHRSYSCQVTHEGSTVEKTVAPTECSGRADCGFTSESYQQGVLSATILYEILLGKATLYAVLVSALVLMAMVKRKDSRGRAKRSGSGVKQTLNFDLLKLAGDVESNPGPTSMDWIWRILFLVGAATGAHSFEQVQLVQSGAEVKKPGASVKVSCKASGYTFTNYGMNWVKQAPGQGLKWMGWINTYTGEPTYADDFKGRVTMTSDTSTSTAYLELHNLRSDDTAVYYCARWSWSDGYYVYFDYWGQGTTVTVSSTRASTKGPSVFPLAPSSKSTSGGTAALGCLVKDYFPEPVTVSWNSGALTSGVHTFPAVLQSSGLYSLSSVVTVPSSSLGTQTYICNVNHKPSNTKVDKRVEPKSCIPEDTFFPSPESSCDVKLVEKSFETDTNLNFQNLSVIGFRILLLKVAGFNLLMTLRLWSS

SEQ ID NO: 22484 - protein, 767 aa, Artificial Sequence
  Synthetic Polypeptide
MALPVTALLLPLALLLHAARPEVQLVESGGGLVQAGGSLRLSCAASGSVFSGNVMGWYRRQAPGKEREWVAAIASGGSIYYRDSVKGRFTISRDNAKNTVYLQMNSLKPEDTAVYYCNSHPPTLPYWGLGTQVTVSSGTGGGGSGGGGSGGGGSEFDEIVLTQSPGSLAVSPGERVTMSCKSSQSVFFSSSQKNYLAWYQQIPGQSPRLLIYWASTRESGVPDRFTGSGSGTDFTLTISSVQPEDLAIYYCHQYLSSRTFGQGTKLEIKRLEGQPKANPTVTLFPPSSEELQANKATLVCLISDFYPGAVTVAWKADGSPVKAGVETTKPSKQSNNKYAASSYLSLTPEQWKSHRSYSCQVTHEGSTVEKTVAPTECSGRADCGFTSESYQQGVLSATILYEILLGKATLYAVLVSALVLMAMVKRKDSRGRAKRSGSGVKQTLNFDLLKLAGDVESNPGPTSMDWIWRILFLVGAATGAHSFEQVQLQQPGAEVVKPGASVKMSCKASGYTFTSYYIHWIKQTPGQGLEWVGVIYPGNDDISYNQKFQGKATLTADKSSTTAYMQLSSLTSEDSAVYYCAREVRLRYFDVWGQGTTVTVSSTRASTKGPSVFPLAPSSKSTSGGTAALGCLVKDYFPEPVTVSWNSGALTSGVHTFPAVLQSSGLYSLSSVVTVPSSSLGTQTYICNVNHKPSNTKVDKRVEPKSCIPEDTFFPSPESSCDVKLVEKSFETDTNLNFQNLSVIGFRILLLKVAGFNLLMTLRLWSS

SEQ ID NO: 22485 - protein, 760 aa, Artificial Sequence
  Synthetic Polypeptide
MALPVTALLLPLALLLHAARPEVQLVESGGGLVQAGGSLRLSCAASGSVFSGNVMGWYRRQAPGKEREWVAAIASGGSIYYRDSVKGRFTISRDNAKNTVYLQMNSLKPEDTAVYYCNSHPPTLPYWGLGTQVTVSSGTGGGGSGGGGSGGGGSEFDDIQMTQSPSSLSASVGDRVTITCRASQSISSYLNWYQQKPGKAPKLLIYAASSLQSGVPSRFSGSGSGTDFTLTISSLQPEDLATYYCQQSYSTPFTFGPGTKVDIKLEDLKNVFPPEVAVFEPSEAEISHTQKATLVCLATGFYPDHVELSWWVNGKEVHSGVCTDPQPLKEQPALNDSRYCLSSRLRVSATFWQNPRNHFRCQVQFYGLSENDEWTQDRAKPVTQIVSAEAWGRADCGFTSESYQQGVLSATILYEILLGKATLYAVLVSALVLMAMVKRKDSRGRAKRSGSGATNFSLLKQAGDVEENPGPTSMDWIWRILFLVGAATGAHSFEVHEVQLVQSGAEVKKPGSSVKVSCKASGGTFSSYAISWVRQAPGQGLEWMGGIIPIFGTANYAQKFQGRVTITADKSTSTAYMELSSLRSEDTAVYYCATFALFGFREQAFDIWGQGTTVTVSSTRIQNPDPAVYQLRDSKSSDKSVCLFTDFDSQTNVSQSKDSDVYITDKCVLDMRSMDFKSNSAVAWSNKSDFACANAFNNSIIPEDTFFPSPESSCDVKLVEKSFETDTNLNFQNLSVIGFRILLLKVAGFNLLMTLRLWSS

SEQ ID NO: 22486 - protein, 786 aa, Artificial Sequence
  Synthetic Polypeptide
MALPVTALLLPLALLLHAARPEVQLVESGGGLVQAGGSLRLSCAASGSVFSGNVMGWYRRQAPGKEREWVAAIASGGSIYYRDSVKGRFTISRDNAKNTVYLQMNSLKPEDTAVYYCNSHPPTLPYWGLGTQVTVSSGTGGGGSGGGGSGGGGSEFDDIQMTQSPSSLSASVGDRVTITCRASQSISSYLNWYQQKPGKAPKLLIYAASSLQSGVPSRFSGSGSGTDFTLTISSLQPEDLATYYCQQSYSTPFTFGPGTKVDIKLEGQPKANPTVTLFPPSSEELQANKATLVCLISDFYPGAVTVAWKADGSPVKAGVETTKPSKQSNNKYAASSYLSLTPEQWKSHRSYSCQVTHEGSTVEKTVAPTECSPIKTDVITMDPKDNCSKDANDTLLLQLTNTSAYYMYLLLLLKSVVYFAIITCCLLRRTAFCCNGEKSRAKRSGSGATNFSLLKQAGDVEENPGPTSMDWIWRILFLVGAATGAHSFEVHEVQLVQSGAEVKKPGSSVKVSCKASGGTFSSYAISWVRQAPGQGLEWMGGIIPIFGTANYAQKFQGRVTITADKSTSTAYMELSSLRSEDTAVYYCATFALFGFREQAFDIWGQGTTVTVSSTRASTKGPSVFPLAPSSKSTSGGTAALGCLVKDYFPEPVTVSWNSGALTSGVHTFPAVLQSSGLYSLSSVVTVPSSSLGTQTYICNVNHKPSNTKVDKRVEPKSCEVKTDSTDHVKPKETENTKQPSKSCHKPKAIVHTEKVNMMSLTVLGLRMLFAKTVAVNFLLTAKLFFL

SEQ ID NO: 22487 - protein, 767 aa, Artificial Sequence
  Synthetic Polypeptide
MALPVTALLLPLALLLHAARPEVQLVESGGGLVQAGGSLRLSCAASGSVFSGNVMGWYRRQAPGKEREWVAAIASGGSIYYRDSVKGRFTISRDNAKNTVYLQMNSLKPEDTAVYYCNSHPPTLPYWGLGTQVTVSSGTGGGGSGGGGSGGGGSEFDDIQMTQSPSSLSASVGDRVTITCRASQSISSYLNWYQQKPGKAPKLLIYAASSLQSGVPSRFSGSGSGTDFTLTISSLQPEDLATYYCQQSYSTPFTFGPGTKVDIKLEGQPKANPTVTLFPPSSEELQANKATLVCLISDFYPGAVTVAWKADGSPVKAGVETTKPSKQSNNKYAASSYLSLTPEQWKSHRSYSCQVTHEGSTVEKTVAPTECSGRADCGFTSESYQQGVLSATILYEILLGKATLYAVLVSALVLMAMVKRKDSRGRAKRSGSGVKQTLNFDLLKLAGDVESNPGPTSMDWIWRILFLVGAATGAHSFEVHEVQLVQSGAEVKKPGSSVKVSCKASGGTFSSYAISWVRQAPGQGLEWMGGIIPIFGTANYAQKFQGRVTITADKSTSTAYMELSSLRSEDTAVYYCATFALFGFREQAFDIWGQGTTVTVSSTRASTKGPSVFPLAPSSKSTSGGTAALGCLVKDYFPEPVTVSWNSGALTSGVHTFPAVLQSSGLYSLSSVVTVPSSSLGTQTYICNVNHKPSNTKVDKRVEPKSCIPEDTFFPSPESSCDVKLVEKSFETDTNLNFQNLSVIGFRILLLKVAGFNLLMTLRLWSS

SEQ ID NO: 22488 - protein, 753 aa, Artificial Sequence
  Synthetic Polypeptide
MALPVTALLLPLALLLHAARPEVQLVESGGGLVQAGGSLRLSCAASGSVFSGNVMGWYRRQAPGKEREWVAAIASGGSIYYRDSVKGRFTISRDNAKNTVYLQMNSLKPEDTAVYYCNSHPPTLPYWGLGTQVTVSSGTGGGGSGGGGSGGGGSEFDVVMTQSPSSLSASVGDRVTITCMASEDIYIRLAWYQQKPGNAPKLLIYAATSLETGVPSRFSGSGSGTDFTLTISSLQPEDFATYYCQQYWSSPWTFGGGTKVEIKLEDLKNVFPPEVAVFEPSEAEISHTQKATLVCLATGFYPDHVELSWWVNGKEVHSGVCTDPQPLKEQPALNDSRYCLSSRLRVSATFWQNPRNHFRCQVQFYGLSENDEWTQDRAKPVTQIVSAEAWGRADCGFTSESYQQGVLSATILYEILLGKATLYAVLVSALVLMAMVKRKDSRGRAKRSGSGATNFSLLKQAGDVEENPGPTSMDWIWRILFLVGAATGAHSFEQVQLQESGPGLVKPSQTLSLTCTVSGYSITSDYTWNWIRQPPGNGLEWIGYITYSGSTSYNPSLKSRVLISVDTSKNQVSLKLSSVTAADTAVYYCARLGRRYTMDYWGQGTTVTVSSTRIQNPDPAVYQLRDSKSSDKSVCLFTDFDSQTNVSQSKDSDVYITDKCVLDMRSMDFKSNSAVAWSNKSDFACANAFNNSIIPEDTFFPSPESSCDVKLVEKSFETDTNLNFQNLSVIGFRILLLKVAGFNLLMTLRLWSS

SEQ ID NO: 22489 - protein, 779 aa, Artificial Sequence
  Synthetic Polypeptide
MALPVTALLLPLALLLHAARPEVQLVESGGGLVQAGGSLRLSCAASGSVFSGNVMGWYRRQAPGKEREWVAAIASGGSIYYRDSVKGRFTISRDNAKNTVYLQMNSLKPEDTAVYYCNSHPPTLPYWGLGTQVTVSSGTGGGGSGGGGSGGGGSEFDVVMTQSPSSLSASVGDRVTITCMASEDIYIRLAWYQQKPGNAPKLLIYAATSLETGVPSRFSGSGSGTDFTLTISSLQPEDFATYYCQQYWSSPWTFGGGTKVEIKLEGQPKANPTVTLFPPSSEELQANKATLVCLISDFYPGAVTVAWKADGSPVKAGVETTKPSKQSNNKYAASSYLSLTPEQWKSHRSYSCQVTHEGSTVEKTVAPTECSPIKTDVITMDPKDNCSKDANDTLLLQLTNTSAYYMYLLLLLKSVVYFAIITCCLLRRTAFCCNGEKSRAKRSGSGATNFSLLKQAGDVEENPGPTSMDWIWRILFLVGAATGAHSFEQVQLQESGPGLVKPSQTLSLTCTVSGYSITSDYTWNWIRQPPGNGLEWIGYITYSGSTSYNPSLKSRVLISVDTSKNQVSLKLSSVTAADTAVYYCARLGRRYTMDYWGQGTTVTVSSTRASTKGPSVFPLAPSSKSTSGGTAALGCLVKDYFPEPVTVSWNSGALTSGVHTFPAVLQSSGLYSLSSVVTVPSSSLGTQTYICNVNHKPSNTKVDKRVEPKSCEVKTDSTDHVKPKETENTKQPSKSCHKPKAIVHTEKVNMMSLTVLGLRMLFAKTVAVNFLLTAKLFFL

SEQ ID NO: 22490 - protein, 897 aa, Artificial Sequence
  Synthetic Polypeptide
MALPVTALLLPLALLLHAARPEVQLVESGGGLVQAGGSLRLSCAASGSVFSGNVMGWYRRQAPGKEREWVAAIASGGSIYYRDSVKGRFTISRDNAKNTVYLQMNSLKPEDTAVYYCNSHPPTLPYWGLGTQVTVSSGTGGGGSGGGGSGGGGSEFDVVMTQSPSSLSASVGDRVTITCMASEDIYIRLAWYQQKPGNAPKLLIYAATSLETGVPSRFSGSGSGTDFTLTISSLQPEDFATYYCQQYWSSPWTFGGGTKVEIKLEGQPKANPTVTLFPPSSEELQANKATLVCLISDFYPGAVTVAWKADGSPVKAGVETTKPSKQSNNKYAASSYLSLTPEQWKSHRSYSCQVTHEGSTVEKTVAPTECSGRADCGFTSESYQQGVLSATILYEILLGKATLYAVLVSALVLMAMVKRKDSRGRAKRSGSGVKQTLNFDLLKLAGDVESNPGPTSMDWIWRILFLVGAATGAHSGPQLQLQESGPGLVKPSETLSLTCTVSGDSISSGDYYWGWIRQPPGKGLEWIGHIYYSGVTYYNPSLKSRVTISVDTSRNQFSLKLSSVTAADTAVYYCTREDSSNWRSRGQGTLVTVSSGSGGGGSGGGGSGGGGSFEQVQLQESGPGLVKPSQTLSLTCTVSGYSITSDYTWNWIRQPPGNGLEWIGYITYSGSTSYNPSLKSRVLISVDTSKNQVSLKLSSVTAADTAVYYCARLGRRYTMDYWGQGTTVTVSSTRASTKGPSVFPLAPSSKSTSGGTAALGCLVKDYFPEPVTVSWNSGALTSGVHTFPAVLQSSGLYSLSSVVTVPSSSLGTQTYICNVNHKPSNTKVDKRVEPKSCIPEDTFFPSPESSCDVKLVEKSFETDTNLNFQNLSVIGFRILLLKVAGFNLLMTLRLWSS

SEQ ID NO: 22491 - protein, 956 aa, Artificial Sequence; identical to SEQ ID NO: 22474
  Synthetic Polypeptide

SEQ ID NO: 22492 - protein, 982 aa, Artificial Sequence; identical to SEQ ID NO: 22475
  Synthetic Polypeptide

SEQ ID NO: 22493 - protein, 960 aa, Artificial Sequence; identical to SEQ ID NO: 22476
  Synthetic Polypeptide

SEQ ID NO: 22494 - protein, 693 aa, Artificial Sequence; identical to SEQ ID NO: 22477
  Synthetic Polypeptide

SEQ ID NO: 22495 - protein, 782 aa, Artificial Sequence; identical to SEQ ID NO: 22478
  Synthetic Polypeptide

SEQ ID NO: 22496 - protein, 9 aa, Artificial Sequence
  Synthetic Polypeptide
GGGGGGGGG

SEQ ID NO: 22497 - protein, 9 aa, Artificial Sequence
  Synthetic Polypeptide
GGGGGGGGG

SEQ ID NO: 22498 - protein, 497 aa, Artificial Sequence
  Synthetic Polypeptide
MALPVTALLLPLALLLHAARPEVQLVESGGGLVQPGGSLRLSCAASGFTFTDYTIHWVRQAPGKGLEWVANINPNNGGTTYNQKFEDRFTISRDNSKNTLYLQMNSLRAEDTAVYYCARGWNFDYWGQGTLVTVSSGGGGSGGGGSGGGGSDIQMTQSPSSLSASVGDRVTITCKASQDVGTAVDWYQQKPGKAPKLLIYWASTRHTGVPSRFSGSGSGTDFTLTISSLQPEDFATYYCQQSWNTPWTFGQGTKLEIKRTREQKLISEEDLAKPTTTPAPRPPTPAPTIASQPLSLRPEACRPAAGGAVHTRGLDFACDIYIWAPLAGTCGVLLLSLVITLYCKRGRKKLLYIFKQPFMRPVQTTQEEDGCSCRFPEEEEGGCELRVKFSRSADAPAYQQGQNQLYNELNLGRREEYDVLDKRRGRDPEMGGKPRRKNPQEGLYNELQKDKMAEAYSEIGMKGERRRGKGHDGLYQGLSTATKDTYDALHMQALPPR

SEQ ID NO: 22499 - protein, 850 aa, Artificial Sequence
  Synthetic Polypeptide
MALPVTALLLPLALLLHAARPDIQMTQSPSSLSASVGDRVTITCKASQDVGTAVDWYQQKPGKAPKLLIYWASTRHTGVPSRFSGSGSGTDFTLTISSLQPEDFATYYCQQSWNTPWTFGQGTKLEIKRLEIQNPDPAVYQLRDSKSSDKSVCLFTDFDSQTNVSQSKDSDVYITDKCVLDMRSMDFKSNSAVAWSNKSDFACANAFNNSIIPEDTFFPSSDVPCDVKLVEKSFETDTNLNFQNLSVIGFRILLLKVAGFNLLMTLRLWSSRAKRSGSGVKQTLNFDLLKLAGDVESNPGPTSMDWIWRILFLVGAATGAHSFEEVQLVESGGGLVQPGGSLRLSCAASGFTFTDYTIHWVRQAPGKGLEWVANINPNNGGTTYNQKFEDRFTISRDNSKNTLYLQMNSLRAEDTAVYYCARGWNFDYWGQGTLVTVSSTREDLKNVFPPEVAVFEPSKAEIAHTQKATLVCLATGFYPDHVELSWWVNGKEVHSGVCTDPQPLKEQPALNDSRYCLSSRLRVSATFWQNPRNHFRCQVQFYGLSENDEWTQDRAKPVTQIVSAEAWGRADCGITSASYHQGVLSATILYEILLGKATLYAVLVSALVLMAMVKRKDSRGRAKRSGSGATNFSLLKQAGDVEENPGPSRGHMTEYKPTVRLATRDDVPRAVRTLAAAFADYPATRHTVDPDRHIERVTELQELFLTRVGLDIGKVWVADDGAAVAVWTTPESVEAGAVFAEIGPRMAELSGSRLAAQQQMEGLLAPHRPKEPAWFLATVGVSPDHQGKGLGSAVVLPGVEAAERAGVPAFLETSAPRNLPFYERLGFTVTADVEVPEGPRTWCMTRKPGA

SEQ ID NO: 22500 - protein, 849 aa, Artificial Sequence
  Synthetic Polypeptide
MALPVTALLLPLALLLHAARPDIQMTQSPSSLSASVGDRVTITCKASQDVGTAVDWYQQKPGKAPKLLIYWASTRHTGVPSRFSGSGSGTDFTLTISSLQPEDFATYYCQQSWNTPWTFGQGTKLEIKRLEDLKNVFPPEVAVFEPSKAEIAHTQKATLVCLATGFYPDHVELSWWVNGKEVHSGVCTDPQPLKEQPALNDSRYCLSSRLRVSATFWQNPRNHFRCQVQFYGLSENDEWTQDRAKPVTQIVSAEAWGRADCGITSASYHQGVLSATILYEILLGKATLYAVLVSALVLMAMVKRKDSRGRAKRSGSGATNFSLLKQAGDVEENPGPTSMDWIWRILFLVGAATGAHSFEEVQLVESGGGLVQPGGSLRLSCAASGFTFTDYTIHWVRQAPGKGLEWVANINPNNGGTTYNQKFEDRFTISRDNSKNTLYLQMNSLRAEDTAVYYCARGWNFDYWGQGTLVTVSSTRIQNPDPAVYQLRDSKSSDKSVCLFTDFDSQTNVSQSKDSDVYITDKCVLDMRSMDFKSNSAVAWSNKSDFACANAFNNSIIPEDTFFPSSDVPCDVKLVEKSFETDTNLNFQNLSVIGFRILLLKVAGFNLLMTLRLWSSRAKRSGSGVKQTLNFDLLKLAGDVESNPGPSRGHMTEYKPTVRLATRDDVPRAVRTLAAAFADYPATRHTVDPDRHIERVTELQELFLTRVGLDIGKVWVADDGAAVAVWTTPESVEAGAVFAEIGPRMAELSGSRLAAQQQMEGLLAPHRPKEPAWFLATVGVSPDHQGKGLGSAVVLPGVEAAERAGVPAFLETSAPRNLPFYERLGFTVTADVEVPEGPRTWCMTRKPGA

SEQ ID NO: 22501 - protein, 616 aa, Artificial Sequence
  Synthetic Polypeptide
MALPVTALLLPLALLLHAARPDIQMTQSPSSLSASVGDRVTITCKASQDVGTAVDWYQQKPGKAPKLLIYWASTRHTGVPSRFSGSGSGTDFTLTISSLQPEDFATYYCQQSWNTPWTFGQGTKLEIKRLEDLKNVFPPEVAVFEPSEAEISHTQKATLVCLATGFYPDHVELSWWVNGKEVHSGVCTDPQPLKEQPALNDSRYCLSSRLRVSATFWQNPRNHFRCQVQFYGLSENDEWTQDRAKPVTQIVSAEAWGRADCGFTSESYQQGVLSATILYEILLGKATLYAVLVSALVLMAMVKRKDSRGRAKRSGSGATNFSLLKQAGDVEENPGPTSMDWIWRILFLVGAATGAHSFEEVQLVESGGGLVQPGGSLRLSCAASGFTFTDYTIHWVRQAPGKGLEWVANINPNNGGTTYNQKFEDRFTISRDNSKNTLYLQMNSLRAEDTAVYYCARGWNFDYWGQGTLVTVSSTRIQNPDPAVYQLRDSKSSDKSVCLFTDFDSQTNVSQSKDSDVYITDKCVLDMRSMDFKSNSAVAWSNKSDFACANAFNNSIIPEDTFFPSPESSCDVKLVEKSFETDTNLNFQNLSVIGFRILLLKVAGFNLLMTLRLWSS

SEQ ID NO: 22502 - protein, 620 aa, Artificial Sequence
  Synthetic Polypeptide
MALPVTALLLPLALLLHAARPDIQMTQSPSSLSASVGDRVTITCKASQDVGTAVDWYQQKPGKAPKLLIYWASTRHTGVPSRFSGSGSGTDFTLTISSLQPEDFATYYCQQSWNTPWTFGQGTKLEIKRLEIQNPDPAVYQLRDSKSSDKSVCLFTDFDSQTNVSQSKDSDVYITDKCVLDMRSMDFKSNSAVAWSNKSDFACANAFNNSIIPEDTFFPSPESSCDVKLVEKSFETDTNLNFQNLSVIGFRILLLKVAGFNLLMTLRLWSSRAKRSGSGVKQTLNFDLLKLAGDVESNPGPTSMDWIWRILFLVGAATGAHSFEEVQLVESGGGLVQPGGSLRLSCAASGFTFTDYTIHWVRQAPGKGLEWVANINPNNGGTTYNQKFEDRFTISRDNSKNTLYLQMNSLRAEDTAVYYCARGWNFDYWGQGTLVTVSSTREDLKNVFPPEVAVFEPSEAEISHTQKATLVCLATGFYPDHVELSWWVNGKEVHSGVCTDPQPLKEQPALNDSRYCLSSRLRVSATFWQNPRNHFRCQVQFYGLSENDEWTQDRAKPVTQIVSAEAWGRADCGFTSESYQQGVLSATILYEILLGKATLYAVLVSALVLMAMVKRKDSRG

SEQ ID NO: 22503 - protein, 894 aa, Artificial Sequence
  Synthetic Polypeptide
MALPVTALLLPLALLLHAARPLEGKPIPNPLLGLDSTGSGEDLKNVFPPEVAVFEPSKAEIAHTQKATLVCLATGFYPDHVELSWWVNGKEVHSGVCTDPQPLKEQPALNDSRYCLSSRLRVSATFWQNPRNHFRCQVQFYGLSENDEWTQDRAKPVTQIVSAEAWGRADCGITSASYHQGVLSATILYEILLGKATLYAVLVSALVLMAMVKRKDSRGRAKRSGSGATNFSLLKQAGDVEENPGPTSMALPVTALLLPLALLLHAARPDIQMTQSPSSLSASVGDRVTITCKASQDVGTAVDWYQQKPGKAPKLLIYWASTRHTGVPSRFSGSGSGTDFTLTISSLQPEDFATYYCQQSWNTPWTFGQGTKLEIKRGGGGSGGGGSGGGGSEVQLVESGGGLVQPGGSLRLSCAASGFTFTDYTIHWVRQAPGKGLEWVANINPNNGGTTYNQKFEDRFTISRDNSKNTLYLQMNSLRAEDTAVYYCARGWNFDYWGQGTLVTVSSTREQKLISEEDGSGIQNPDPAVYQLRDSKSSDKSVCLFTDFDSQTNVSQSKDSDVYITDKCVLDMRSMDFKSNSAVAWSNKSDFACANAFNNSIIPEDTFFPSSDVPCDVKLVEKSFETDTNLNFQNLSVIGFRILLLKVAGFNLLMTLRLWSSRAKRSGSGVKQTLNFDLLKLAGDVESNPGPSRGHMTEYKPTVRLATRDDVPRAVRTLAAAFADYPATRHTVDPDRHIERVTELQELFLTRVGLDIGKVWVADDGAAVAVWTTPESVEAGAVFAEIGPRMAELSGSRLAAQQQMEGLLAPHRPKEPAWFLATVGVSPDHQGKGLGSAVVLPGVEAAERAGVPAFLETSAPRNLPFYERLGFTVTADVEVPEGPRTWCMTRKPGA

SEQ ID NO: 22504 - protein, 886 aa, Artificial Sequence
  Synthetic Polypeptide
MALPVTALLLPLALLLHAARPDIQMTQSPSSLSASVGDRVTITCKASQDVGTAVDWYQQKPGKAPKLLIYWASTRHTGVPSRFSGSGSGTDFTLTISSLQPEDFATYYCQQSWNTPWTFGQGTKLEIKRLEGKPIPNPLLGLDSTGSGDKQLDADVSPKPTIFLPSIAETKLQKAGTYLCLLEKFFPDVIKIHWQEKKSNTILGSQEGNTMKTNDTYMKFSWLTVPEKSLDKEHRCIVRHENNKNGVDQEIIFPPIKTDVITMDPKDNCSKDANDTLLLQLTNTSAYYMYLLLLLKSVVYFAIITCCLLRRTAFCCNGEKSRAKRSGSGATNFSLLKQAGDVEENPGPTSMDWIWRILFLVGAATGAHSFEEVQLVESGGGLVQPGGSLRLSCAASGFTFTDYTIHWVRQAPGKGLEWVANINPNNGGTTYNQKFEDRFTISRDNSKNTLYLQMNSLRAEDTAVYYCARGWNFDYWGQGTLVTVSSTREQKLISEEDGSGSQPHTKPSVFVMKNGTNVACLVKEFYPKDIRINLVSSKKITEFDPAIVISPSGKYNAVKLGKYEDSNSVTCSVQHDNKTVHSTDFEVKTDSTDHVKPKETENTKQPSKSCHKPKAIVHTEKVNMMSLTVLGLRMLFAKTVAVNFLLTAKLFFLRAKRSGSGVKQTLNFDLLKLAGDVESNPGPSRGHMTEYKPTVRLATRDDVPRAVRTLAAAFADYPATRHTVDPDRHIERVTELQELFLTRVGLDIGKVWVADDGAAVAVWTTPESVEAGAVFAEIGPRMAELSGSRLAAQQQMEGLLAPHRPKEPAWFLATVGVSPDHQGKGLGSAVVLPGVEAAERAGVPAFLETSAPRNLPFYERLGFTVTADVEVPEGPRTWCMTRKPGA

SEQ ID NO: 22505 - protein, 624 aa, Artificial Sequence
  Synthetic Polypeptide
MALPVTALLLPLALLLHAARPDIQMTQSPSSLSASVGDRVTITCKASQDVGTAVDWYQQKPGKAPKLLIYWASTRHTGVPSRFSGSGSGTDFTLTISSLQPEDFATYYCQQSWNTPWTFGQGTKLEIKRLESQPHTKPSVFVMKNGTNVACLVKEFYPKDIRINLVSSKKITEFDPAIVISPSGKYNAVKLGKYEDSNSVTCSVQHDNKTVHSTDFEVKTDSTDHVKPKETENTKQPSKSCHKPKAIVHTEKVNMMSLTVLGLRMLFAKTVAVNFLLTAKLFFLRAKRSGSGATNFSLLKQAGDVEENPGPTSMDWIWRILFLVGAATGAHSFEEVQLVESGGGLVQPGGSLRLSCAASGFTFTDYTIHWVRQAPGKGLEWVANINPNNGGTTYNQKFEDRFTISRDNSKNTLYLQMNSLRAEDTAVYYCARGWNFDYWGQGTLVTVSSTRDKQLDADVSPKPTIFLPSIAETKLQKAGTYLCLLEKFFPDVIKIHWQEKKSNTILGSQEGNTMKTNDTYMKFSWLTVPEKSLDKEHRCIVRHENNKNGVDQEIIFPPIKTDVITMDPKDNCSKDANDTLLLQLTNTSAYYMYLLLLLKSVVYFAIITCCLLRRTAFCCNGEKS

SEQ ID NO: 22506 - protein, 901 aa, Artificial Sequence
  Synthetic Polypeptide
MALPVTALLLPLALLLHAARPLEGKPIPNPLLGLDSTGSGDKQLDADVSPKPTIFLPSIAETKLQKAGTYLCLLEKFFPDVIKIHWQEKKSNTILGSQEGNTMKTNDTYMKFSWLTVPEKSLDKEHRCIVRHENNKNGVDQEIIFPPIKTDVITMDPKDNCSKDANDTLLLQLTNTSAYYMYLLLLLKSVVYFAIITCCLLRRTAFCCNGEKSRAKRSGSGATNFSLLKQAGDVEENPGPTSMALPVTALLLPLALLLHAARPDIQMTQSPSSLSASVGDRVTITCKASQDVGTAVDWYQQKPGKAPKLLIYWASTRHTGVPSRFSGSGSGTDFTLTISSLQPEDFATYYCQQSWNTPWTFGQGTKLEIKRGGGGSGGGGSGGGGSEVQLVESGGGLVQPGGSLRLSCAASGFTFTDYTIHWVRQAPGKGLEWVANINPNNGGTTYNQKFEDRFTISRDNSKNTLYLQMNSLRAEDTAVYYCARGWNFDYWGQGTLVTVSSTREQKLISEEDGSGSQPHTKPSVFVMKNGTNVACLVKEFYPKDIRINLVSSKKITEFDPAIVISPSGKYNAVKLGKYEDSNSVTCSVQHDNKTVHSTDFEVKTDSTDHVKPKETENTKQPSKSCHKPKAIVHTEKVNMMSLTVLGLRMLFAKTVAVNFLLTAKLFFLRAKRSGSGVKQTLNFDLLKLAGDVESNPGPSRGHMTEYKPTVRLATRDDVPRAVRTLAAAFADYPATRHTVDPDRHIERVTELQELFLTRVGLDIGKVWVADDGAAVAVWTTPESVEAGAVFAEIGPRMAELSGSRLAAQQQMEGLLAPHRPKEPAWFLATVGVSPDHQGKGLGSAVVLPGVEAAERAGVPAFLETSAPRNLPFYERLGFTVTADVEVPEGPRTWCMTRKPGA

SEQ ID NO: 22507 - protein, 1026 aa, Artificial Sequence
  Synthetic Polypeptide
MALPVTALLLPLALLLHAARPDIQMTQSPSSLSASVGDRVTITCKASQDVGTAVDWYQQKPGKAPKLLIYWASTRHTGVPSRFSGSGSGTDFTLTISSLQPEDFATYYCQQSWNTPWTFGQGTKLEIKRGQPKANPTVTLFPPSSEELQANKATLVCLISDFYPGAVTVAWKADGSPVKAGVETTKPSKQSNNKYAASSYLSLTPEQWKSHRSYSCQVTHEGSTVEKTVAPTECSGSQSFGLLDPKLCYLLDGILFIYGVILTALFLRVKFSRSADAPAYQQGQNQLYNELNLGRREEYDVLDKRRGRDPEMGGKPQRRKNPQEGLYNELQKDKMAEAYSEIGMKGERRRGKGHDGLYQGLSTATKDTYDALHMQALPPRRAKRSGSGATNFSLLKQAGDVEENPGPTSMDWIWRILFLVGAATGAHSFEEVQLVESGGGLVQPGGSLRLSCAASGFTFTDYTIHWVRQAPGKGLEWVANINPNNGGTTYNQKFEDRFTISRDNSKNTLYLQMNSLRAEDTAVYYCARGWNFDYWGQGTLVTVSSASTKGPSVFPLAPSSKSTSGGTAALGCLVKDYFPEPVTVSWNSGALTSGVHTFPAVLQSSGLYSLSSVVTVPSSSLGTQTYICNVNHKPSNTKVDKRVEPKSCGTQSFGLLDPKLCYLLDGILFIYGVILTALFLRVKFSRSADAPAYQQGQNQLYNELNLGRREEYDVLDKRRGRDPEMGGKPQRRKNPQEGLYNELQKDKMAEAYSEIGMKGERRRGKGHDGLYQGLSTATKDTYDALHMQALPPRRAKRSGSGVKQTLNFDLLKLAGDVESNPGPSRGHMTEYKPTVRLATRDDVPRAVRTLAAAFADYPATRHTVDPDRHIERVTELQELFLTRVGLDIGKVWVADDGAAVAVWTTPESVEAGAVFAEIGPRMAELSGSRLAAQQQMEGLLAPHRPKEPAWFLATVGVSPDHQGKGLGSAVVLPGVEAAERAGVPAFLETSAPRNLPFYERLGFTVTADVEVPEGPRTWCMTRKPGA

SEQ ID NO: 22508 - protein, 642 aa, Artificial Sequence
  Synthetic Polypeptide
MALPVTALLLPLALLLHAARPDIQMTQSPSSLSASVGDRVTITCKASQDVGTAVDWYQQKPGKAPKLLIYWASTRHTGVPSRFSGSGSGTDFTLTISSLQPEDFATYYCQQSWNTPWTFGQGTKLEIKRLEGQPKANPTVTLFPPSSEELQANKATLVCLISDFYPGAVTVAWKADGSPVKAGVETTKPSKQSNNKYAASSYLSLTPEQWKSHRSYSCQVTHEGSTVEKTVAPTECSPIKTDVITMDPKDNCSKDANDTLLLQLTNTSAYYMYLLLLLKSVVYFAIITCCLLRRTAFCCNGEKSRAKRSGSGATNFSLLKQAGDVEENPGPTSMDWIWRILFLVGAATGAHSFEEVQLVESGGGLVQPGGSLRLSCAASGFTFTDYTIHWVRQAPGKGLEWVANINPNNGGTTYNQKFEDRFTISRDNSKNTLYLQMNSLRAEDTAVYYCARGWNFDYWGQGTLVTVSSTRASTKGPSVFPLAPSSKSTSGGTAALGCLVKDYFPEPVTVSWNSGALTSGVHTFPAVLQSSGLYSLSSVVTVPSSSLGTQTYICNVNHKPSNTKVDKRVEPKSCEVKTDSTDHVKPKETENTKQPSKSCHKPKAIVHTEKVNMMSLTVLGLRMLFAKTVAVNFLLTAKLFFL

SEQ ID NO: 22509 - protein, 620 aa, Artificial Sequence
  Synthetic Polypeptide
MALPVTALLLPLALLLHAARPDIQMTQSPSSLSASVGDRVTITCKASQDVGTAVDWYQQKPGKAPKLLIYWASTRHTGVPSRFSGSGSGTDFTLTISSLQPEDFATYYCQQSWNTPWTFGQGTKLEIKRLEGQPKANPTVTLFPPSSEELQANKATLVCLISDFYPGAVTVAWKADGSPVKAGVETTKPSKQSNNKYAASSYLSLTPEQWKSHRSYSCQVTHEGSTVEKTVAPTECSGRADCGFTSESYQQGVLSATILYEILLGKATLYAVLVSALVLMAMVKRKDSRGRAKRSGSGATNFSLLKQAGDVEENPGPTSMDWIWRILFLVGAATGAHSFEEVQLVESGGGLVQPGGSLRLSCAASGFTFTDYTIHWVRQAPGKGLEWVANINPNNGGTTYNQKFEDRFTISRDNSKNTLYLQMNSLRAEDTAVYYCARGWNFDYWGQGTLVTVSSTRASTKGPSVFPLAPSSKSTSGGTAALGCLVKDYFPEPVTVSWNSGALTSGVHTFPAVLQSSGLYSLSSVVTVPSSSLGTQTYICNVNHKPSNTKVDKRVEPKSCIPEDTFFPSPESSCDVKLVEKSFETDTNLNFQNLSVIGFRILLLKVAGFNLLMTLRLWSS

SEQ ID NO: 22510 - protein, 446 aa, Artificial Sequence
  Synthetic Polypeptide
MALPVTALLLPLALLLHAARPDIQMTQSPSSLSASVGDRVTITCKASQDVGTAVDWYQQKPGKAPKLLIYWASTRHTGVPSRFSGSGSGTDFTLTISSLQPEDFATYYCQQSWNTPWTFGQGTKLEIKRGGGGSGGGGSGGGGSEVQLVESGGGLVQPGGSLRLSCAASGFTFTDYTIHWVRQAPGKGLEWVANINPNNGGTTYNQKFEDRFTISRDNSKNTLYLQMNSLRAEDTAVYYCARGWNFDYWGQGTLVTVSSTRDGNEEMGGITQTPYKVSISGTTVILTCPQYPGSEILWQHNDKNIGGDEDDKNIGSDEDHLSLKEFSELEQSGYYVCYPRGSKPEDANFYLYLRARVCENCMEMDVMSVATIVIVDICITGGLLLLVYYWSKNRKAKAKPVTRGAGAGGRQRGQNKERPPPVPNPDYEPIRKGQRDLYSGLNQRRI

SEQ ID NO: 22511 - protein, 411 aa, Artificial Sequence
  Synthetic Polypeptide
MALPVTALLLPLALLLHAARPDIQMTQSPSSLSASVGDRVTITCKASQDVGTAVDWYQQKPGKAPKLLIYWASTRHTGVPSRFSGSGSGTDFTLTISSLQPEDFATYYCQQSWNTPWTFGQGTKLEIKRGGGGSGGGGSGGGGSEVQLVESGGGLVQPGGSLRLSCAASGFTFTDYTIHWVRQAPGKGLEWVANINPNNGGTTYNQKFEDRFTISRDNSKNTLYLQMNSLRAEDTAVYYCARGWNFDYWGQGTLVTVSSTRFKIPIEELEDRVFVNCNTSITWVEGTVGTLLSDITRLDLGKRILDPRGIYRCNGTDIYKDKESTVQVHYRMCQSCVELDPATVAGIIVTDVIATLLLALGVFCFAGHETGRLSGAADTQALLRNDQVYQPLRDRDDAQYSHLGGNWARNK

SEQ ID NO: 22512 - protein, 421 aa, Artificial Sequence
  Synthetic Polypeptide
MALPVTALLLPLALLLHAARPDIQMTQSPSSLSASVGDRVTITCKASQDVGTAVDWYQQKPGKAPKLLIYWASTRHTGVPSRFSGSGSGTDFTLTISSLQPEDFATYYCQQSWNTPWTFGQGTKLEIKRGGGGSGGGGSGGGGSEVQLVESGGGLVQPGGSLRLSCAASGFTFTDYTIHWVRQAPGKGLEWVANINPNNGGTTYNQKFEDRFTISRDNSKNTLYLQMNSLRAEDTAVYYCARGWNFDYWGQGTLVTVSSTRQSIKGNHLVKVYDYQEDGSVLLTCDAEAKNITWFKDGKMIGFLTEDKKKWNLGSNAKDPRGMYQCKGSQNKSKPLQVYYRMCQNCIELNAATISGFLFAEIVSIFVLAVGVYFIAGQDGVRQSRASDKQTLLPNDQLYQPLKDREDDQYSHLQGNQLRRN

SEQ ID NO: 22513 - protein, 751 aa, Artificial Sequence
  Synthetic Polypeptide
MALPVTALLLPLALLLHAARPEVQLVESGGGLVQPGGSLRLSCAASGFSFSDFWMSWVRQAPGKGLEWVATISQAGSEKDYVDSVKGRFTISRDNAKKSLYLQMNSLRAEDTAVYYCASGVYSFDYRGQGTLVTVSSGTGGGGSGGGGSGGGGSEFDIQMTQSPSSLSASVGDRVTITCKASQDVGTAVDWYQQKPGKAPKLLIYWASTRHTGVPSRFSGSGSGTDFTLTISSLQPEDFATYYCQQSWNTPWTFGQGTKLEIKRLEDLKNVFPPEVAVFEPSEAEISHTQKATLVCLATGFYPDHVELSWWVNGKEVHSGVCTDPQPLKEQPALNDSRYCLSSRLRVSATFWQNPRNHFRCQVQFYGLSENDEWTQDRAKPVTQIVSAEAWGRADCGFTSESYQQGVLSATILYEILLGKATLYAVLVSALVLMAMVKRKDSRGRAKRSGSGATNFSLLKQAGDVEENPGPTSMDWIWRILFLVGAATGAHSFEEVQLVESGGGLVQPGGSLRLSCAASGFTFTDYTIHWVRQAPGKGLEWVANINPNNGGTTYNQKFEDRFTISRDNSKNTLYLQMNSLRAEDTAVYYCARGWNFDYWGQGTLVTVSSTRIQNPDPAVYQLRDSKSSDKSVCLFTDFDSQTNVSQSKDSDVYITDKCVLDMRSMDFKSNSAVAWSNKSDFACANAFNNSIIPEDTFFPSPESSCDVKLVEKSFETDTNLNFQNLSVIGFRILLLKVAGFNLLMTLRLWSS

SEQ ID NO: 22514 - protein, 777 aa, Artificial Sequence
  Synthetic Polypeptide
MALPVTALLLPLALLLHAARPEVQLVESGGGLVQPGGSLRLSCAASGFSFSDFWMSWVRQAPGKGLEWVATISQAGSEKDYVDSVKGRFTISRDNAKKSLYLQMNSLRAEDTAVYYCASGVYSFDYRGQGTLVTVSSGTGGGGSGGGGSGGGGSEFDIQMTQSPSSLSASVGDRVTITCKASQDVGTAVDWYQQKPGKAPKLLIYWASTRHTGVPSRFSGSGSGTDFTLTISSLQPEDFATYYCQQSWNTPWTFGQGTKLEIKRLEGQPKANPTVTLFPPSSEELQANKATLVCLISDFYPGAVTVAWKADGSPVKAGVETTKPSKQSNNKYAASSYLSLTPEQWKSHRSYSCQVTHEGSTVEKTVAPTECSPIKTDVITMDPKDNCSKDANDTLLLQLTNTSAYYMYLLLLLKSVVYFAIITCCLLRRTAFCCNGEKSRAKRSGSGATNFSLLKQAGDVEENPGPTSMDWIWRILFLVGAATGAHSFEEVQLVESGGGLVQPGGSLRLSCAASGFTFTDYTIHWVRQAPGKGLEWVANINPNNGGTTYNQKFEDRFTISRDNSKNTLYLQMNSLRAEDTAVYYCARGWNFDYWGQGTLVTVSSTRASTKGPSVFPLAPSSKSTSGGTAALGCLVKDYFPEPVTVSWNSGALTSGVHTFPAVLQSSGLYSLSSVVTVPSSSLGTQTYICNVNHKPSNTKVDKRVEPKSCEVKTDSTDHVKPKETENTKQPSKSCHKPKAIVHTEKVNMMSLTVLGLRMLFAKTVAVNFLLTAKLFFL

SEQ ID NO: 22515 - protein, 758 aa, Artificial Sequence
  Synthetic Polypeptide
MALPVTALLLPLALLLHAARPEVQLVESGGGLVQPGGSLRLSCAASGFSFSDFWMSWVRQAPGKGLEWVATISQAGSEKDYVDSVKGRFTISRDNAKKSLYLQMNSLRAEDTAVYYCASGVYSFDYRGQGTLVTVSSGTGGGGSGGGGSGGGGSEFDIQMTQSPSSLSASVGDRVTITCKASQDVGTAVDWYQQKPGKAPKLLIYWASTRHTGVPSRFSGSGSGTDFTLTISSLQPEDFATYYCQQSWNTPWTFGQGTKLEIKRLEGQPKANPTVTLFPPSSEELQANKATLVCLISDFYPGAVTVAWKADGSPVKAGVETTKPSKQSNNKYAASSYLSLTPEQWKSHRSYSCQVTHEGSTVEKTVAPTECSGRADCGFTSESYQQGVLSATILYEILLGKATLYAVLVSALVLMAMVKRKDSRGRAKRSGSGVKQTLNFDLLKLAGDVESNPGPTSMDWIWRILFLVGAATGAHSFEEVQLVESGGGLVQPGGSLRLSCAASGFTFTDYTIHWVRQAPGKGLEWVANINPNNGGTTYNQKFEDRFTISRDNSKNTLYLQMNSLRAEDTAVYYCARGWNFDYWGQGTLVTVSSTRASTKGPSVFPLAPSSKSTSGGTAALGCLVKDYFPEPVTVSWNSGALTSGVHTFPAVLQSSGLYSLSSVVTVPSSSLGTQTYICNVNHKPSNTKVDKRVEPKSCIPEDTFFPSPESSCDVKLVEKSFETDTNLNFQNLSVIGFRILLLKVAGFNLLMTLRLWSS

SEQ ID NO: 22516 - protein, 892 aa, Artificial Sequence
  Synthetic Polypeptide
MALPVTALLLPLALLLHAARPEVQLVESGGGLVQPGGSLRLSCAASGFSFSDFWMSWVRQAPGKGLEWVATISQAGSEKDYVDSVKGRFTISRDNAKKSLYLQMNSLRAEDTAVYYCASGVYSFDYRGQGTLVTVSSGTGGGGSGGGGSGGGGSEFDIQMTQSPSSLSASVGDRVTITCKASQDVGTAVDWYQQKPGKAPKLLIYWASTRHTGVPSRFSGSGSGTDFTLTISSLQPEDFATYYCQQSWNTPWTFGQGTKLEIKRLEIQNPDPAVYQLRDSKSSDKSVCLFTDFDSQTNVSQSKDSDVYITDKCVLDMRSMDFKSNSAVAWSNKSDFACANAFNNSIIPEDTFFPSPESSCDVKLVEKSFETDTNLNFQNLSVIGFRILLLKVAGFNLLMTLRLWSSRAKRSGSGVKQTLNFDLLKLAGDVESNPGPTSMDWIWRILFLVGAATGAHSGPQLQLQESGPGLVKPSETLSLTCTVSGDSISSGDYYWGWIRQPPGKGLEWIGHIYYSGVTYYNPSLKSRVTISVDTSRNQFSLKLSSVTAADTAVYYCTREDSSNWRSRGQGTLVTVSSGSGGGGSGGGGSGGGGSFEEVQLVESGGGLVQPGGSLRLSCAASGFTFTDYTIHWVRQAPGKGLEWVANINPNNGGTTYNQKFEDRFTISRDNSKNTLYLQMNSLRAEDTAVYYCARGWNFDYWGQGTLVTVSSTREDLKNVFPPEVAVFEPSEAEISHTQKATLVCLATGFYPDHVELSWWVNGKEVHSGVCTDPQPLKEQPALNDSRYCLSSRLRVSATFWQNPRNHFRCQVQFYGLSENDEWTQDRAKPVTQIVSAEAWGRADCGFTSESYQQGVLSATILYEILLGKATLYAVLVSALVLMAMVKRKDSRG

SEQ ID NO: 22517 - protein, 914 aa, Artificial Sequence
  Synthetic Polypeptide
MALPVTALLLPLALLLHAARPEVQLVESGGGLVQPGGSLRLSCAASGFSFSDFWMSWVRQAPGKGLEWVATISQAGSEKDYVDSVKGRFTISRDNAKKSLYLQMNSLRAEDTAVYYCASGVYSFDYRGQGTLVTVSSGTGGGGSGGGGSGGGGSEFDIQMTQSPSSLSASVGDRVTITCKASQDVGTAVDWYQQKPGKAPKLLIYWASTRHTGVPSRFSGSGSGTDFTLTISSLQPEDFATYYCQQSWNTPWTFGQGTKLEIKRLEGQPKANPTVTLFPPSSEELQANKATLVCLISDFYPGAVTVAWKADGSPVKAGVETTKPSKQSNNKYAASSYLSLTPEQWKSHRSYSCQVTHEGSTVEKTVAPTECSPIKTDVITMDPKDNCSKDANDTLLLQLTNTSAYYMYLLLLLKSVVYFAIITCCLLRRTAFCCNGEKSRAKRSGSGATNFSLLKQAGDVEENPGPTSMDWIWRILFLVGAATGAHSGPQLQLQESGPGLVKPSETLSLTCTVSGDSISSGDYYWGWIRQPPGKGLEWIGHIYYSGVTYYNPSLKSRVTISVDTSRNQFSLKLSSVTAADTAVYYCTREDSSNWRSRGQGTLVTVSSGSGGGGSGGGGSGGGGSFEEVQLVESGGGLVQPGGSLRLSCAASGFTFTDYTIHWVRQAPGKGLEWVANINPNNGGTTYNQKFEDRFTISRDNSKNTLYLQMNSLRAEDTAVYYCARGWNFDYWGQGTLVTVSSTRASTKGPSVFPLAPSSKSTSGGTAALGCLVKDYFPEPVTVSWNSGALTSGVHTFPAVLQSSGLYSLSSVVTVPSSSLGTQTYICNVNHKPSNTKVDKRVEPKSCEVKTDSTDHVKPKETENTKQPSKSCHKPKAIVHTEKVNMMSLTVLGLRMLFAKTVAVNFLLTAKLFFL

SEQ ID NO: 22518 - protein, 895 aa, Artificial Sequence
  Synthetic Polypeptide
MALPVTALLLPLALLLHAARPEVQLVESGGGLVQPGGSLRLSCAASGFSFSDFWMSWVRQAPGKGLEWVATISQAGSEKDYVDSVKGRFTISRDNAKKSLYLQMNSLRAEDTAVYYCASGVYSFDYRGQGTLVTVSSGTGGGGSGGGGSGGGGSEFDIQMTQSPSSLSASVGDRVTITCKASQDVGTAVDWYQQKPGKAPKLLIYWASTRHTGVPSRFSGSGSGTDFTLTISSLQPEDFATYYCQQSWNTPWTFGQGTKLEIKRLEGQPKANPTVTLFPPSSEELQANKATLVCLISDFYPGAVTVAWKADGSPVKAGVETTKPSKQSNNKYAASSYLSLTPEQWKSHRSYSCQVTHEGSTVEKTVAPTECSGRADCGFTSESYQQGVLSATILYEILLGKATLYAVLVSALVLMAMVKRKDSRGRAKRSGSGVKQTLNFDLLKLAGDVESNPGPTSMDWIWRILFLVGAATGAHSGPQLQLQESGPGLVKPSETLSLTCTVSGDSISSGDYYWGWIRQPPGKGLEWIGHIYYSGVTYYNPSLKSRVTISVDTSRNQFSLKLSSVTAADTAVYYCTREDSSNWRSRGQGTLVTVSSGSGGGGSGGGGSGGGGSFEEVQLVESGGGLVQPGGSLRLSCAASGFTFTDYTIHWVRQAPGKGLEWVANINPNNGGTTYNQKFEDRFTISRDNSKNTLYLQMNSLRAEDTAVYYCARGWNFDYWGQGTLVTVSSTRASTKGPSVFPLAPSSKSTSGGTAALGCLVKDYFPEPVTVSWNSGALTSGVHTFPAVLQSSGLYSLSSVVTVPSSSLGTQTYICNVNHKPSNTKVDKRVEPKSCIPEDTFFPSPESSCDVKLVEKSFETDTNLNFQNLSVIGFRILLLKVAGFNLLMTLRLWSS

SEQ ID NO: 22519 - protein, 503 aa, Artificial Sequence
  Synthetic Polypeptide
MALPVTALLLPLALLLHAARPEVQLVESGGGLVQPGGSLRLSCAASGFNIKDTYIHWVRQAPGKGLEWVARIYPTNGYTRYADSVKGRFTISADTSKNTAYLQMNSLRAEDTAVYYCSRWGGDGFAAMDVWGQGTLVTVSSGGGGSGGGGSGGGGSDIQMTQSPSSLSASVGDRVTITCRASQDVNTAVAWYQQKPGKAPKLLIYSASFLESGVPSRFSGSRSGTDFTLTISSLQPEDFATYYCQQAYTTPPTFGQGTKVEIKRTTREQKLISEEDLAKPTTTPAPRPPTPAPTIASQPLSLRPEACRPAAGGAVHTRGLDFACDIYIWAPLAGTCGVLLLSLVITLYCKRGRKKLLYIFKQPFMRPVQTTQEEDGCSCRFPEEEEGGCELRVKFSRSADAPAYQQGQNQLYNELNLGRREEYDVLDKRRGRDPEMGGKPRRKNPQEGLYNELQKDKMAEAYSEIGMKGERRRGKGHDGLYQGLSTATKDTYDALHMQALPPR

SEQ ID NO: 22520 - protein, 856 aa, Artificial Sequence
  Synthetic Polypeptide
MALPVTALLLPLALLLHAARPDIQMTQSPSSLSASVGDRVTITCRASQDVNTAVAWYQQKPGKAPKLLIYSASFLESGVPSRFSGSRSGTDFTLTISSLQPEDFATYYCQQAYTTPPTFGQGTKVEIKRTLEIQNPDPAVYQLRDSKSSDKSVCLFTDFDSQTNVSQSKDSDVYITDKCVLDMRSMDFKSNSAVAWSNKSDFACANAFNNSIIPEDTFFPSSDVPCDVKLVEKSFETDTNLNFQNLSVIGFRILLLKVAGFNLLMTLRLWSSRAKRSGSGVKQTLNFDLLKLAGDVESNPGPTSMDWIWRILFLVGAATGAHSFEEVQLVESGGGLVQPGGSLRLSCAASGFNIKDTYIHWVRQAPGKGLEWVARIYPTNGYTRYADSVKGRFTISADTSKNTAYLQMNSLRAEDTAVYYCSRWGGDGFAAMDVWGQGTLVTVSSTREDLKNVFPPEVAVFEPSKAEIAHTQKATLVCLATGFYPDHVELSWWVNGKEVHSGVCTDPQPLKEQPALNDSRYCLSSRLRVSATFWQNPRNHFRCQVQFYGLSENDEWTQDRAKPVTQIVSAEAWGRADCGITSASYHQGVLSATILYEILLGKATLYAVLVSALVLMAMVKRKDSRGRAKRSGSGATNFSLLKQAGDVEENPGPSRGHMTEYKPTVRLATRDDVPRAVRTLAAAFADYPATRHTVDPDRHIERVTELQELFLTRVGLDIGKVWVADDGAAVAVWTTPESVEAGAVFAEIGPRMAELSGSRLAAQQQMEGLLAPHRPKEPAWFLATVGVSPDHQGKGLGSAVVLPGVEAAERAGVPAFLETSAPRNLPFYERLGFTVTADVEVPEGPRTWCMTRKPGA

SEQ ID NO: 22521 - protein, 855 aa, Artificial Sequence
  Synthetic Polypeptide
MALPVTALLLPLALLLHAARPDIQMTQSPSSLSASVGDRVTITCRASQDVNTAVAWYQQKPGKAPKLLIYSASFLESGVPSRFSGSRSGTDFTLTISSLQPEDFATYYCQQAYTTPPTFGQGTKVEIKRTLEDLKNVFPPEVAVFEPSKAEIAHTQKATLVCLATGFYPDHVELSWWVNGKEVHSGVCTDPQPLKEQPALNDSRYCLSSRLRVSATFWQNPRNHFRCQVQFYGLSENDEWTQDRAKPVTQIVSAEAWGRADCGITSASYHQGVLSATILYEILLGKATLYAVLVSALVLMAMVKRKDSRGRAKRSGSGATNFSLLKQAGDVEENPGPTSMDWIWRILFLVGAATGAHSFEEVQLVESGGGLVQPGGSLRLSCAASGFNIKDTYIHWVRQAPGKGLEWVARIYPTNGYTRYADSVKGRFTISADTSKNTAYLQMNSLRAEDTAVYYCSRWGGDGFAAMDVWGQGTLVTVSSTRIQNPDPAVYQLRDSKSSDKSVCLFTDFDSQTNVSQSKDSDVYITDKCVLDMRSMDFKSNSAVAWSNKSDFACANAFNNSIIPEDTFFPSSDVPCDVKLVEKSFETDTNLNFQNLSVIGFRILLLKVAGFNLLMTLRLWSSRAKRSGSGVKQTLNFDLLKLAGDVESNPGPSRGHMTEYKPTVRLATRDDVPRAVRTLAAAFADYPATRHTVDPDRHIERVTELQELFLTRVGLDIGKVWVADDGAAVAVWTTPESVEAGAVFAEIGPRMAELSGSRLAAQQQMEGLLAPHRPKEPAWFLATVGVSPDHQGKGLGSAVVLPGVEAAERAGVPAFLETSAPRNLPFYERLGFTVTADVEVPEGPRTWCMTRKPGA

SEQ ID NO: 22522 - protein, 622 aa, Artificial Sequence
  Synthetic Polypeptide
MALPVTALLLPLALLLHAARPDIQMTQSPSSLSASVGDRVTITCRASQDVNTAVAWYQQKPGKAPKLLIYSASFLESGVPSRFSGSRSGTDFTLTISSLQPEDFATYYCQQAYTTPPTFGQGTKVEIKRTLEDLKNVFPPEVAVFEPSEAEISHTQKATLVCLATGFYPDHVELSWWVNGKEVHSGVCTDPQPLKEQPALNDSRYCLSSRLRVSATFWQNPRNHFRCQVQFYGLSENDEWTQDRAKPVTQIVSAEAWGRADCGFTSESYQQGVLSATILYEILLGKATLYAVLVSALVLMAMVKRKDSRGRAKRSGSGATNFSLLKQAGDVEENPGPTSMDWIWRILFLVGAATGAHSFEEVQLVESGGGLVQPGGSLRLSCAASGFNIKDTYIHWVRQAPGKGLEWVARIYPTNGYTRYADSVKGRFTISADTSKNTAYLQMNSLRAEDTAVYYCSRWGGDGFAAMDVWGQGTLVTVSSTRIQNPDPAVYQLRDSKSSDKSVCLFTDFDSQTNVSQSKDSDVYITDKCVLDMRSMDFKSNSAVAWSNKSDFACANAFNNSIIPEDTFFPSPESSCDVKLVEKSFETDTNLNFQNLSVIGFRILLLKVAGFNLLMTLRLWSS

SEQ ID NO: 22523 - protein, 626 aa, Artificial Sequence
  Synthetic Polypeptide
MALPVTALLLPLALLLHAARPDIQMTQSPSSLSASVGDRVTITCRASQDVNTAVAWYQQKPGKAPKLLIYSASFLESGVPSRFSGSRSGTDFTLTISSLQPEDFATYYCQQAYTTPPTFGQGTKVEIKRTLEIQNPDPAVYQLRDSKSSDKSVCLFTDFDSQTNVSQSKDSDVYITDKCVLDMRSMDFKSNSAVAWSNKSDFACANAFNNSIIPEDTFFPSPESSCDVKLVEKSFETDTNLNFQNLSVIGFRILLLKVAGFNLLMTLRLWSSRAKRSGSGVKQTLNFDLLKLAGDVESNPGPTSMDWIWRILFLVGAATGAHSFEEVQLVESGGGLVQPGGSLRLSCAASGFNIKDTYIHWVRQAPGKGLEWVARIYPTNGYTRYADSVKGRFTISADTSKNTAYLQMNSLRAEDTAVYYCSRWGGDGFAAMDVWGQGTLVTVSSTREDLKNVFPPEVAVFEPSEAEISHTQKATLVCLATGFYPDHVELSWWVNGKEVHSGVCTDPQPLKEQPALNDSRYCLSSRLRVSATFWQNPRNHFRCQVQFYGLSENDEWTQDRAKPVTQIVSAEAWGRADCGFTSESYQQGVLSATILYEILLGKATLYAVLVSALVLMAMVKRKDSRG

SEQ ID NO: 22524 - protein, 900 aa, Artificial Sequence
  Synthetic Polypeptide
MALPVTALLLPLALLLHAARPLEGKPIPNPLLGLDSTGSGEDLKNVFPPEVAVFEPSKAEIAHTQKATLVCLATGFYPDHVELSWWVNGKEVHSGVCTDPQPLKEQPALNDSRYCLSSRLRVSATFWQNPRNHFRCQVQFYGLSENDEWTQDRAKPVTQIVSAEAWGRADCGITSASYHQGVLSATILYEILLGKATLYAVLVSALVLMAMVKRKDSRGRAKRSGSGATNFSLLKQAGDVEENPGPTSMALPVTALLLPLALLLHAARPDIQMTQSPSSLSASVGDRVTITCRASQDVNTAVAWYQQKPGKAPKLLIYSASFLESGVPSRFSGSRSGTDFTLTISSLQPEDFATYYCQQAYTTPPTFGQGTKVEIKRTGGGGSGGGGSGGGGSEVQLVESGGGLVQPGGSLRLSCAASGFNIKDTYIHWVRQAPGKGLEWVARIYPTNGYTRYADSVKGRFTISADTSKNTAYLQMNSLRAEDTAVYYCSRWGGDGFAAMDVWGQGTLVTVSSTREQKLISEEDGSGIQNPDPAVYQLRDSKSSDKSVCLFTDFDSQTNVSQSKDSDVYITDKCVLDMRSMDFKSNSAVAWSNKSDFACANAFNNSIIPEDTFFPSSDVPCDVKLVEKSFETDTNLNFQNLSVIGFRILLLKVAGFNLLMTLRLWSSRAKRSGSGVKQTLNFDLLKLAGDVESNPGPSRGHMTEYKPTVRLATRDDVPRAVRTLAAAFADYPATRHTVDPDRHIERVTELQELFLTRVGLDIGKVWVADDGAAVAVWTTPESVEAGAVFAEIGPRMAELSGSRLAAQQQMEGLLAPHRPKEPAWFLATVGVSPDHQGKGLGSAVVLPGVEAAERAGVPAFLETSAPRNLPFYERLGFTVTADVEVPEGPRTWCMTRKPGA

SEQ ID NO: 22525 - protein, 892 aa, Artificial Sequence
  Synthetic Polypeptide
MALPVTALLLPLALLLHAARPDIQMTQSPSSLSASVGDRVTITCRASQDVNTAVAWYQQKPGKAPKLLIYSASFLESGVPSRFSGSRSGTDFTLTISSLQPEDFATYYCQQAYTTPPTFGQGTKVEIKRTLEGKPIPNPLLGLDSTGSGDKQLDADVSPKPTIFLPSIAETKLQKAGTYLCLLEKFFPDVIKIHWQEKKSNTILGSQEGNTMKTNDTYMKFSWLTVPEKSLDKEHRCIVRHENNKNGVDQEIIFPPIKTDVITMDPKDNCSKDANDTLLLQLTNTSAYYMYLLLLLKSVVYFAIITCCLLRRTAFCCNGEKSRAKRSGSGATNFSLLKQAGDVEENPGPTSMDWIWRILFLVGAATGAHSFEEVQLVESGGGLVQPGGSLRLSCAASGFNIKDTYIHWVRQAPGKGLEWVARIYPTNGYTRYADSVKGRFTISADTSKNTAYLQMNSLRAEDTAVYYCSRWGGDGFAAMDVWGQGTLVTVSSTREQKLISEEDGSGSQPHTKPSVFVMKNGTNVACLVKEFYPKDIRINLVSSKKITEFDPAIVISPSGKYNAVKLGKYEDSNSVTCSVQHDNKTVHSTDFEVKTDSTDHVKPKETENTKQPSKSCHKPKAIVHTEKVNMMSLTVLGLRMLFAKTVAVNFLLTAKLFFLRAKRSGSGVKQTLNFDLLKLAGDVESNPGPSRGHMTEYKPTVRLATRDDVPRAVRTLAAAFADYPATRHTVDPDRHIERVTELQELFLTRVGLDIGKVWVADDGAAVAVWTTPESVEAGAVFAEIGPRMAELSGSRLAAQQQMEGLLAPHRPKEPAWFLATVGVSPDHQGKGLGSAVVLPGVEAAERAGVPAFLETSAPRNLPFYERLGFTVTADVEVPEGPRTWCMTRKPGA

SEQ ID NO: 22526 - protein, 630 aa, Artificial Sequence
  Synthetic Polypeptide
MALPVTALLLPLALLLHAARPDIQMTQSPSSLSASVGDRVTITCRASQDVNTAVAWYQQKPGKAPKLLIYSASFLESGVPSRFSGSRSGTDFTLTISSLQPEDFATYYCQQAYTTPPTFGQGTKVEIKRTLESQPHTKPSVFVMKNGTNVACLVKEFYPKDIRINLVSSKKITEFDPAIVISPSGKYNAVKLGKYEDSNSVTCSVQHDNKTVHSTDFEVKTDSTDHVKPKETENTKQPSKSCHKPKAIVHTEKVNMMSLTVLGLRMLFAKTVAVNFLLTAKLFFLRAKRSGSGATNFSLLKQAGDVEENPGPTSMDWIWRILFLVGAATGAHSFEEVQLVESGGGLVQPGGSLRLSCAASGFNIKDTYIHWVRQAPGKGLEWVARIYPTNGYTRYADSVKGRFTISADTSKNTAYLQMNSLRAEDTAVYYCSRWGGDGFAAMDVWGQGTLVTVSSTRDKQLDADVSPKPTIFLPSIAETKLQKAGTYLCLLEKFFPDVIKIHWQEKKSNTILGSQEGNTMKTNDTYMKFSWLTVPEKSLDKEHRCIVRHENNKNGVDQEIIFPPIKTDVITMDPKDNCSKDANDTLLLQLTNTSAYYMYLLLLLKSVVYFAIITCCLLRRTAFCCNGEKS

SEQ ID NO: 22527 - protein, 907 aa, Artificial Sequence
  Synthetic Polypeptide
MALPVTALLLPLALLLHAARPLEGKPIPNPLLGLDSTGSGDKQLDADVSPKPTIFLPSIAETKLQKAGTYLCLLEKFFPDVIKIHWQEKKSNTILGSQEGNTMKTNDTYMKFSWLTVPEKSLDKEHRCIVRHENNKNGVDQEIIFPPIKTDVITMDPKDNCSKDANDTLLLQLTNTSAYYMYLLLLLKSVVYFAIITCCLLRRTAFCCNGEKSRAKRSGSGATNFSLLKQAGDVEENPGPTSMALPVTALLLPLALLLHAARPDIQMTQSPSSLSASVGDRVTITCRASQDVNTAVAWYQQKPGKAPKLLIYSASFLESGVPSRFSGSRSGTDFTLTISSLQPEDFATYYCQQAYTTPPTFGQGTKVEIKRTGGGGSGGGGSGGGGSEVQLVESGGGLVQPGGSLRLSCAASGFNIKDTYIHWVRQAPGKGLEWVARIYPTNGYTRYADSVKGRFTISADTSKNTAYLQMNSLRAEDTAVYYCSRWGGDGFAAMDVWGQGTLVTVSSTREQKLISEEDGSGSQPHTKPSVFVMKNGTNVACLVKEFYPKDIRINLVSSKKITEFDPAIVISPSGKYNAVKLGKYEDSNSVTCSVQHDNKTVHSTDFEVKTDSTDHVKPKETENTKQPSKSCHKPKAIVHTEKVNMMSLTVLGLRMLFAKTVAVNFLLTAKLFFLRAKRSGSGVKQTLNFDLLKLAGDVESNPGPSRGHMTEYKPTVRLATRDDVPRAVRTLAAAFADYPATRHTVDPDRHIERVTELQELFLTRVGLDIGKVWVADDGAAVAVWTTPESVEAGAVFAEIGPRMAELSGSRLAAQQQMEGLLAPHRPKEPAWFLATVGVSPDHQGKGLGSAVVLPGVEAAERAGVPAFLETSAPRNLPFYERLGFTVTADVEVPEGPRTWCMTRKPGA

SEQ ID NO: 22528 - protein, 1032 aa, Artificial Sequence
  Synthetic Polypeptide
MALPVTALLLPLALLLHAARPDIQMTQSPSSLSASVGDRVTITCRASQDVNTAVAWYQQKPGKAPKLLIYSASFLESGVPSRFSGSRSGTDFTLTISSLQPEDFATYYCQQAYTTPPTFGQGTKVEIKRTGQPKANPTVTLFPPSSEELQANKATLVCLISDFYPGAVTVAWKADGSPVKAGVETTKPSKQSNNKYAASSYLSLTPEQWKSHRSYSCQVTHEGSTVEKTVAPTECSGSQSFGLLDPKLCYLLDGILFIYGVILTALFLRVKFSRSADAPAYQQGQNQLYNELNLGRREEYDVLDKRRGRDPEMGGKPQRRKNPQEGLYNELQKDKMAEAYSEIGMKGERRRGKGHDGLYQGLSTATKDTYDALHMQALPPRRAKRSGSGATNFSLLKQAGDVEENPGPTSMDWIWRILFLVGAATGAHSFEEVQLVESGGGLVQPGGSLRLSCAASGFNIKDTYIHWVRQAPGKGLEWVARIYPTNGYTRYADSVKGRFTISADTSKNTAYLQMNSLRAEDTAVYYCSRWGGDGFAAMDVWGQGTLVTVSSASTKGPSVFPLAPSSKSTSGGTAALGCLVKDYFPEPVTVSWNSGALTSGVHTFPAVLQSSGLYSLSSVVTVPSSSLGTQTYICNVNHKPSNTKVDKRVEPKSCGTQSFGLLDPKLCYLLDGILFIYGVILTALFLRVKFSRSADAPAYQQGQNQLYNELNLGRREEYDVLDKRRGRDPEMGGKPQRRKNPQEGLYNELQKDKMAEAYSEIGMKGERRRGKGHDGLYQGLSTATKDTYDALHMQALPPRRAKRSGSGVKQTLNFDLLKLAGDVESNPGPSRGHMTEYKPTVRLATRDDVPRAVRTLAAAFADYPATRHTVDPDRHIERVTELQELFLTRVGLDIGKVWVADDGAAVAVWTTPESVEAGAVFAEIGPRMAELSGSRLAAQQQMEGLLAPHRPKEPAWFLATVGVSPDHQGKGLGSAVVLPGVEAAERAGVPAFLETSAPRNLPFYERLGFTVTADVEVPEGPRTWCMTRKPGA

SEQ ID NO: 22529 - protein, 648 aa, Artificial Sequence
  Synthetic Polypeptide
MALPVTALLLPLALLLHAARPDIQMTQSPSSLSASVGDRVTITCRASQDVNTAVAWYQQKPGKAPKLLIYSASFLESGVPSRFSGSRSGTDFTLTISSLQPEDFATYYCQQAYTTPPTFGQGTKVEIKRTLEGQPKANPTVTLFPPSSEELQANKATLVCLISDFYPGAVTVAWKADGSPVKAGVETTKPSKQSNNKYAASSYLSLTPEQWKSHRSYSCQVTHEGSTVEKTVAPTECSPIKTDVITMDPKDNCSKDANDTLLLQLTNTSAYYMYLLLLLKSVVYFAIITCCLLRRTAFCCNGEKSRAKRSGSGATNFSLLKQAGDVEENPGPTSMDWIWRILFLVGAATGAHSFEEVQLVESGGGLVQPGGSLRLSCAASGFNIKDTYIHWVRQAPGKGLEWVARIYPTNGYTRYADSVKGRFTISADTSKNTAYLQMNSLRAEDTAVYYCSRWGGDGFAAMDVWGQGTLVTVSSTRASTKGPSVFPLAPSSKSTSGGTAALGCLVKDYFPEPVTVSWNSGALTSGVHTFPAVLQSSGLYSLSSVVTVPSSSLGTQTYICNVNHKPSNTKVDKRVEPKSCEVKTDSTDHVKPKETENTKQPSKSCHKPKAIVHTEKVNMMSLTVLGLRMLFAKTVAVNFLLTAKLFFL

SEQ ID NO: 22530 - protein, 626 aa, Artificial Sequence
  Synthetic Polypeptide
MALPVTALLLPLALLLHAARPDIQMTQSPSSLSASVGDRVTITCRASQDVNTAVAWYQQKPGKAPKLLIYSASFLESGVPSRFSGSRSGTDFTLTISSLQPEDFATYYCQQAYTTPPTFGQGTKVEIKRTLEGQPKANPTVTLFPPSSEELQANKATLVCLISDFYPGAVTVAWKADGSPVKAGVETTKPSKQSNNKYAASSYLSLTPEQWKSHRSYSCQVTHEGSTVEKTVAPTECSGRADCGFTSESYQQGVLSATILYEILLGKATLYAVLVSALVLMAMVKRKDSRGRAKRSGSGATNFSLLKQAGDVEENPGPTSMDWIWRILFLVGAATGAHSFEEVQLVESGGGLVQPGGSLRLSCAASGFNIKDTYIHWVRQAPGKGLEWVARIYPTNGYTRYADSVKGRFTISADTSKNTAYLQMNSLRAEDTAVYYCSRWGGDGFAAMDVWGQGTLVTVSSTRASTKGPSVFPLAPSSKSTSGGTAALGCLVKDYFPEPVTVSWNSGALTSGVHTFPAVLQSSGLYSLSSVVTVPSSSLGTQTYICNVNHKPSNTKVDKRVEPKSCIPEDTFFPSPESSCDVKLVEKSFETDTNLNFQNLSVIGFRILLLKVAGFNLLMTLRLWSS

SEQ ID NO: 22531 - protein, 452 aa, Artificial Sequence
  Synthetic Polypeptide
MALPVTALLLPLALLLHAARPDIQMTQSPSSLSASVGDRVTITCRASQDVNTAVAWYQQKPGKAPKLLIYSASFLESGVPSRFSGSRSGTDFTLTISSLQPEDFATYYCQQAYTTPPTFGQGTKVEIKRTGGGGSGGGGSGGGGSEVQLVESGGGLVQPGGSLRLSCAASGFNIKDTYIHWVRQAPGKGLEWVARIYPTNGYTRYADSVKGRFTISADTSKNTAYLQMNSLRAEDTAVYYCSRWGGDGFAAMDVWGQGTLVTVSSTRDGNEEMGGITQTPYKVSISGTTVILTCPQYPGSEILWQHNDKNIGGDEDDKNIGSDEDHLSLKEFSELEQSGYYVCYPRGSKPEDANFYLYLRARVCENCMEMDVMSVATIVIVDICITGGLLLLVYYWSKNRKAKAKPVTRGAGAGGRQRGQNKERPPPVPNPDYEPIRKGQRDLYSGLNQRRI

SEQ ID NO: 22532 - protein, 417 aa, Artificial Sequence
  Synthetic Polypeptide
MALPVTALLLPLALLLHAARPDIQMTQSPSSLSASVGDRVTITCRASQDVNTAVAWYQQKPGKAPKLLIYSASFLESGVPSRFSGSRSGTDFTLTISSLQPEDFATYYCQQAYTTPPTFGQGTKVEIKRTGGGGSGGGGSGGGGSEVQLVESGGGLVQPGGSLRLSCAASGFNIKDTYIHWVRQAPGKGLEWVARIYPTNGYTRYADSVKGRFTISADTSKNTAYLQMNSLRAEDTAVYYCSRWGGDGFAAMDVWGQGTLVTVSSTRFKIPIEELEDRVFVNCNTSITWVEGTVGTLLSDITRLDLGKRILDPRGIYRCNGTDIYKDKESTVQVHYRMCQSCVELDPATVAGIIVTDVIATLLLALGVFCFAGHETGRLSGAADTQALLRNDQVYQPLRDRDDAQYSHLGGNWARNK

SEQ ID NO: 22533 - protein, 427 aa, Artificial Sequence
  Synthetic Polypeptide
MALPVTALLLPLALLLHAARPDIQMTQSPSSLSASVGDRVTITCRASQDVNTAVAWYQQKPGKAPKLLIYSASFLESGVPSRFSGSRSGTDFTLTISSLQPEDFATYYCQQAYTTPPTFGQGTKVEIKRTGGGGSGGGGSGGGGSEVQLVESGGGLVQPGGSLRLSCAASGFNIKDTYIHWVRQAPGKGLEWVARIYPTNGYTRYADSVKGRFTISADTSKNTAYLQMNSLRAEDTAVYYCSRWGGDGFAAMDVWGQGTLVTVSSTRQSIKGNHLVKVYDYQEDGSVLLTCDAEAKNITWFKDGKMIGFLTEDKKKWNLGSNAKDPRGMYQCKGSQNKSKPLQVYYRMCQNCIELNAATISGFLFAEIVSIFVLAVGVYFIAGQDGVRQSRASDKQTLLPNDQLYQPLKDREDDQYSHLQGNQLRRN

SEQ ID NO: 22534 - protein, 757 aa, Artificial Sequence
  Synthetic Polypeptide
MALPVTALLLPLALLLHAARPEVQLVESGGGLVQPGGSLRLSCAASGFSFSDFWMSWVRQAPGKGLEWVATISQAGSEKDYVDSVKGRFTISRDNAKKSLYLQMNSLRAEDTAVYYCASGVYSFDYRGQGTLVTVSSGTGGGGSGGGGSGGGGSEFDIQMTQSPSSLSASVGDRVTITCRASQDVNTAVAWYQQKPGKAPKLLIYSASFLESGVPSRFSGSRSGTDFTLTISSLQPEDFATYYCQQAYTTPPTFGQGTKVEIKRTLEDLKNVFPPEVAVFEPSEAEISHTQKATLVCLATGFYPDHVELSWWVNGKEVHSGVCTDPQPLKEQPALNDSRYCLSSRLRVSATFWQNPRNHFRCQVQFYGLSENDEWTQDRAKPVTQIVSAEAWGRADCGFTSESYQQGVLSATILYEILLGKATLYAVLVSALVLMAMVKRKDSRGRAKRSGSGATNFSLLKQAGDVEENPGPTSMDWIWRILFLVGAATGAHSFEEVQLVESGGGLVQPGGSLRLSCAASGFNIKDTYIHWVRQAPGKGLEWVARIYPTNGYTRYADSVKGRFTISADTSKNTAYLQMNSLRAEDTAVYYCSRWGGDGFAAMDVWGQGTLVTVSSTRIQNPDPAVYQLRDSKSSDKSVCLFTDFDSQTNVSQSKDSDVYITDKCVLDMRSMDFKSNSAVAWSNKSDFACANAFNNSIIPEDTFFPSPESSCDVKLVEKSFETDTNLNFQNLSVIGFRILLLKVAGFNLLMTLRLWSS

SEQ ID NO: 22535 - protein, 783 aa, Artificial Sequence
  Synthetic Polypeptide
MALPVTALLLPLALLLHAARPEVQLVESGGGLVQPGGSLRLSCAASGFSFSDFWMSWVRQAPGKGLEWVATISQAGSEKDYVDSVKGRFTISRDNAKKSLYLQMNSLRAEDTAVYYCASGVYSFDYRGQGTLVTVSSGTGGGGSGGGGSGGGGSEFDIQMTQSPSSLSASVGDRVTITCRASQDVNTAVAWYQQKPGKAPKLLIYSASFLESGVPSRFSGSRSGTDFTLTISSLQPEDFATYYCQQAYTTPPTFGQGTKVEIKRTLEGQPKANPTVTLFPPSSEELQANKATLVCLISDFYPGAVTVAWKADGSPVKAGVETTKPSKQSNNKYAASSYLSLTPEQWKSHRSYSCQVTHEGSTVEKTVAPTECSPIKTDVITMDPKDNCSKDANDTLLLQLTNTSAYYMYLLLLLKSVVYFAIITCCLLRRTAFCCNGEKSRAKRSGSGATNFSLLKQAGDVEENPGPTSMDWIWRILFLVGAATGAHSFEEVQLVESGGGLVQPGGSLRLSCAASGFNIKDTYIHWVRQAPGKGLEWVARIYPTNGYTRYADSVKGRFTISADTSKNTAYLQMNSLRAEDTAVYYCSRWGGDGFAAMDVWGQGTLVTVSSTRASTKGPSVFPLAPSSKSTSGGTAALGCLVKDYFPEPVTVSWNSGALTSGVHTFPAVLQSSGLYSLSSVVTVPSSSLGTQTYICNVNHKPSNTKVDKRVEPKSCEVKTDSTDHVKPKETENTKQPSKSCHKPKAIVHTEKVNMMSLTVLGLRMLFAKTVAVNFLLTAKLFFL

SEQ ID NO: 22536 - protein, 764 aa, Artificial Sequence
  Synthetic Polypeptide
MALPVTALLLPLALLLHAARPEVQLVESGGGLVQPGGSLRLSCAASGFSFSDFWMSWVRQAPGKGLEWVATISQAGSEKDYVDSVKGRFTISRDNAKKSLYLQMNSLRAEDTAVYYCASGVYSFDYRGQGTLVTVSSGTGGGGSGGGGSGGGGSEFDIQMTQSPSSLSASVGDRVTITCRASQDVNTAVAWYQQKPGKAPKLLIYSASFLESGVPSRFSGSRSGTDFTLTISSLQPEDFATYYCQQAYTTPPTFGQGTKVEIKRTLEGQPKANPTVTLFPPSSEELQANKATLVCLISDFYPGAVTVAWKADGSPVKAGVETTKPSKQSNNKYAASSYLSLTPEQWKSHRSYSCQVTHEGSTVEKTVAPTECSGRADCGFTSESYQQGVLSATILYEILLGKATLYAVLVSALVLMAMVKRKDSRGRAKRSGSGVKQTLNFDLLKLAGDVESNPGPTSMDWIWRILFLVGAATGAHSFEEVQLVESGGGLVQPGGSLRLSCAASGFNIKDTYIHWVRQAPGKGLEWVARIYPTNGYTRYADSVKGRFTISADTSKNTAYLQMNSLRAEDTAVYYCSRWGGDGFAAMDVWGQGTLVTVSSTRASTKGPSVFPLAPSSKSTSGGTAALGCLVKDYFPEPVTVSWNSGALTSGVHTFPAVLQSSGLYSLSSVVTVPSSSLGTQTYICNVNHKPSNTKVDKRVEPKSCIPEDTFFPSPESSCDVKLVEKSFETDTNLNFQNLSVIGFRILLLKVAGFNLLMTLRLWSS

SEQ ID NO: 22537 - protein, 898 aa, Artificial Sequence
  Synthetic Polypeptide
MALPVTALLLPLALLLHAARPEVQLVESGGGLVQPGGSLRLSCAASGFSFSDFWMSWVRQAPGKGLEWVATISQAGSEKDYVDSVKGRFTISRDNAKKSLYLQMNSLRAEDTAVYYCASGVYSFDYRGQGTLVTVSSGTGGGGSGGGGSGGGGSEFDIQMTQSPSSLSASVGDRVTITCRASQDVNTAVAWYQQKPGKAPKLLIYSASFLESGVPSRFSGSRSGTDFTLTISSLQPEDFATYYCQQAYTTPPTFGQGTKVEIKRTLEIQNPDPAVYQLRDSKSSDKSVCLFTDFDSQTNVSQSKDSDVYITDKCVLDMRSMDFKSNSAVAWSNKSDFACANAFNNSIIPEDTFFPSPESSCDVKLVEKSFETDTNLNFQNLSVIGFRILLLKVAGFNLLMTLRLWSSRAKRSGSGVKQTLNFDLLKLAGDVESNPGPTSMDWIWRILFLVGAATGAHSGPQLQLQESGPGLVKPSETLSLTCTVSGDSISSGDYYWGWIRQPPGKGLEWIGHIYYSGVTYYNPSLKSRVTISVDTSRNQFSLKLSSVTAADTAVYYCTREDSSNWRSRGQGTLVTVSSGSGGGGSGGGGSGGGGSFEEVQLVESGGGLVQPGGSLRLSCAASGFNIKDTYIHWVRQAPGKGLEWVARIYPTNGYTRYADSVKGRFTISADTSKNTAYLQMNSLRAEDTAVYYCSRWGGDGFAAMDVWGQGTLVTVSSTREDLKNVFPPEVAVFEPSEAEISHTQKATLVCLATGFYPDHVELSWWVNGKEVHSGVCTDPQPLKEQPALNDSRYCLSSRLRVSATFWQNPRNHFRCQVQFYGLSENDEWTQDRAKPVTQIVSAEAWGRADCGFTSESYQQGVLSATILYEILLGKATLYAVLVSALVLMAMVKRKDSRG

SEQ ID NO: 22538 - protein, 920 aa, Artificial Sequence
  Synthetic Polypeptide
MALPVTALLLPLALLLHAARPEVQLVESGGGLVQPGGSLRLSCAASGFSFSDFWMSWVRQAPGKGLEWVATISQAGSEKDYVDSVKGRFTISRDNAKKSLYLQMNSLRAEDTAVYYCASGVYSFDYRGQGTLVTVSSGTGGGGSGGGGSGGGGSEFDIQMTQSPSSLSASVGDRVTITCRASQDVNTAVAWYQQKPGKAPKLLIYSASFLESGVPSRFSGSRSGTDFTLTISSLQPEDFATYYCQQAYTTPPTFGQGTKVEIKRTLEGQPKANPTVTLFPPSSEELQANKATLVCLISDFYPGAVTVAWKADGSPVKAGVETTKPSKQSNNKYAASSYLSLTPEQWKSHRSYSCQVTHEGSTVEKTVAPTECSPIKTDVITMDPKDNCSKDANDTLLLQLTNTSAYYMYLLLLLKSVVYFAIITCCLLRRTAFCCNGEKSRAKRSGSGATNFSLLKQAGDVEENPGPTSMDWIWRILFLVGAATGAHSGPQLQLQESGPGLVKPSETLSLTCTVSGDSISSGDYYWGWIRQPPGKGLEWIGHIYYSGVTYYNPSLKSRVTISVDTSRNQFSLKLSSVTAADTAVYYCTREDSSNWRSRGQGTLVTVSSGSGGGGSGGGGSGGGGSFEEVQLVESGGGLVQPGGSLRLSCAASGFNIKDTYIHWVRQAPGKGLEWVARIYPTNGYTRYADSVKGRFTISADTSKNTAYLQMNSLRAEDTAVYYCSRWGGDGFAAMDVWGQGTLVTVSSTRASTKGPSVFPLAPSSKSTSGGTAALGCLVKDYFPEPVTVSWNSGALTSGVHTFPAVLQSSGLYSLSSVVTVPSSSLGTQTYICNVNHKPSNTKVDKRVEPKSCEVKTDSTDHVKPKETENTKQPSKSCHKPKAIVHTEKVNMMSLTVLGLRMLFAKTVAVNFLLTAKLFFL

SEQ ID NO: 22539 - protein, 901 aa, Artificial Sequence
  Synthetic Polypeptide
MALPVTALLLPLALLLHAARPEVQLVESGGGLVQPGGSLRLSCAASGFSFSDFWMSWVRQAPGKGLEWVATISQAGSEKDYVDSVKGRFTISRDNAKKSLYLQMNSLRAEDTAVYYCASGVYSFDYRGQGTLVTVSSGTGGGGSGGGGSGGGGSEFDIQMTQSPSSLSASVGDRVTITCRASQDVNTAVAWYQQKPGKAPKLLIYSASFLESGVPSRFSGSRSGTDFTLTISSLQPEDFATYYCQQAYTTPPTFGQGTKVEIKRTLEGQPKANPTVTLFPPSSEELQANKATLVCLISDFYPGAVTVAWKADGSPVKAGVETTKPSKQSNNKYAASSYLSLTPEQWKSHRSYSCQVTHEGSTVEKTVAPTECSGRADCGFTSESYQQGVLSATILYEILLGKATLYAVLVSALVLMAMVKRKDSRGRAKRSGSGVKQTLNFDLLKLAGDVESNPGPTSMDWIWRILFLVGAATGAHSGPQLQLQESGPGLVKPSETLSLTCTVSGDSISSGDYYWGWIRQPPGKGLEWIGHIYYSGVTYYNPSLKSRVTISVDTSRNQFSLKLSSVTAADTAVYYCTREDSSNWRSRGQGTLVTVSSGSGGGGSGGGGSGGGGSFEEVQLVESGGGLVQPGGSLRLSCAASGFNIKDTYIHWVRQAPGKGLEWVARIYPTNGYTRYADSVKGRFTISADTSKNTAYLQMNSLRAEDTAVYYCSRWGGDGFAAMDVWGQGTLVTVSSTRASTKGPSVFPLAPSSKSTSGGTAALGCLVKDYFPEPVTVSWNSGALTSGVHTFPAVLQSSGLYSLSSVVTVPSSSLGTQTYICNVNHKPSNTKVDKRVEPKSCIPEDTFFPSPESSCDVKLVEKSFETDTNLNFQNLSVIGFRILLLKVAGFNLLMTLRLWSS

SEQ ID NO: 22540 - protein, 499 aa, Artificial Sequence; identical to SEQ ID NO: 21208
  Synthetic Polypeptide

SEQ ID NO: 22541 - protein, 852 aa, Artificial Sequence; identical to SEQ ID NO: 21210
  Synthetic Polypeptide

SEQ ID NO: 22542 - protein, 851 aa, Artificial Sequence; identical to SEQ ID NO: 21211
  Synthetic Polypeptide

SEQ ID NO: 22543 - protein, 618 aa, Artificial Sequence; identical to SEQ ID NO: 21212
  Synthetic Polypeptide

SEQ ID NO: 22544 - protein, 622 aa, Artificial Sequence; identical to SEQ ID NO: 21214
  Synthetic Polypeptide

SEQ ID NO: 22545 - protein, 896 aa, Artificial Sequence; identical to SEQ ID NO: 21216
  Synthetic Polypeptide

SEQ ID NO: 22546 - protein, 888 aa, Artificial Sequence; identical to SEQ ID NO: 21221
  Synthetic Polypeptide

SEQ ID NO: 22547 - protein, 626 aa, Artificial Sequence; identical to SEQ ID NO: 21222
  Synthetic Polypeptide

SEQ ID NO: 22548 - protein, 903 aa, Artificial Sequence; identical to SEQ ID NO: 21223
  Synthetic Polypeptide

SEQ ID NO: 22549 - protein, 1028 aa, Artificial Sequence; identical to SEQ ID NO: 21224
  Synthetic Polypeptide

SEQ ID NO: 22550 - protein, 644 aa, Artificial Sequence; identical to SEQ ID NO: 21232
  Synthetic Polypeptide

SEQ ID NO: 22551 - protein, 622 aa, Artificial Sequence; identical to SEQ ID NO: 21234
  Synthetic Polypeptide

SEQ ID NO: 22552 - protein, 448 aa, Artificial Sequence; identical to SEQ ID NO: 21235
  Synthetic Polypeptide

SEQ ID NO: 22553 - protein, 413 aa, Artificial Sequence; identical to SEQ ID NO: 21236
  Synthetic Polypeptide

SEQ ID NO: 22554 - protein, 423 aa, Artificial Sequence; identical to SEQ ID NO: 21237
  Synthetic Polypeptide

SEQ ID NO: 22555 - protein, 753 aa, Artificial Sequence; identical to SEQ ID NO: 21260
  Synthetic Polypeptide

SEQ ID NO: 22556 - protein, 779 aa, Artificial Sequence; identical to SEQ ID NO: 21263
  Synthetic Polypeptide

SEQ ID NO: 22557 - protein, 760 aa, Artificial Sequence; identical to SEQ ID NO: 21264
  Synthetic Polypeptide

SEQ ID NO: 22558 - protein, 894 aa, Artificial Sequence; identical to SEQ ID NO: 21265
  Synthetic Polypeptide

SEQ ID NO: 22559 - protein, 916 aa, Artificial Sequence; identical to SEQ ID NO: 21267
  Synthetic Polypeptide

SEQ ID NO: 22560 - protein, 897 aa, Artificial Sequence; identical to SEQ ID NO: 21268
  Synthetic Polypeptide

SEQ ID NO: 22561 - protein, 499 aa, Artificial Sequence
  Synthetic Polypeptide
MALPVTALLLPLALLLHAARPEVQLVESGGGLVQPGGSLRLSCAASGYTFSDYFMSWVRQAPGKGLEWVATISNGGTYTYYPDSVKGRFTISRDNSKNTLYLQMNSLRAEDTAVYYCARFDGYIFDYWGQGTLVTVSSGGGGSGGGGSGGGGSDIQMTQSPSSLSASVGDRVTITCRASQDISSYLNWYQQKPGKAPKLLIYYTSRLHSGVPSRFSGSGSGTDFTLTISSLQPEDFATYYCQQGNTLPYTFGQGTKVEIKRTREQKLISEEDLAKPTTTPAPRPPTPAPTIASQPLSLRPEACRPAAGGAVHTRGLDFACDIYIWAPLAGTCGVLLLSLVITLYCKRGRKKLLYIFKQPFMRPVQTTQEEDGCSCRFPEEEEGGCELRVKFSRSADAPAYQQGQNQLYNELNLGRREEYDVLDKRRGRDPEMGGKPRRKNPQEGLYNELQKDKMAEAYSEIGMKGERRRGKGHDGLYQGLSTATKDTYDALHMQALPPR

SEQ ID NO: 22562 - protein, 852 aa, Artificial Sequence
  Synthetic Polypeptide
MALPVTALLLPLALLLHAARPDIQMTQSPSSLSASVGDRVTITCRASQDISSYLNWYQQKPGKAPKLLIYYTSRLHSGVPSRFSGSGSGTDFTLTISSLQPEDFATYYCQQGNTLPYTFGQGTKVEIKRLEIQNPDPAVYQLRDSKSSDKSVCLFTDFDSQTNVSQSKDSDVYITDKCVLDMRSMDFKSNSAVAWSNKSDFACANAFNNSIIPEDTFFPSSDVPCDVKLVEKSFETDTNLNFQNLSVIGFRILLLKVAGFNLLMTLRLWSSRAKRSGSGVKQTLNFDLLKLAGDVESNPGPTSMDWIWRILFLVGAATGAHSFEEVQLVESGGGLVQPGGSLRLSCAASGYTFSDYFMSWVRQAPGKGLEWVATISNGGTYTYYPDSVKGRFTISRDNSKNTLYLQMNSLRAEDTAVYYCARFDGYIFDYWGQGTLVTVSSTREDLKNVFPPEVAVFEPSKAEIAHTQKATLVCLATGFYPDHVELSWWVNGKEVHSGVCTDPQPLKEQPALNDSRYCLSSRLRVSATFWQNPRNHFRCQVQFYGLSENDEWTQDRAKPVTQIVSAEAWGRADCGITSASYHQGVLSATILYEILLGKATLYAVLVSALVLMAMVKRKDSRGRAKRSGSGATNFSLLKQAGDVEENPGPSRGHMTEYKPTVRLATRDDVPRAVRTLAAAFADYPATRHTVDPDRHIERVTELQELFLTRVGLDIGKVWVADDGAAVAVWTTPESVEAGAVFAEIGPRMAELSGSRLAAQQQMEGLLAPHRPKEPAWFLATVGVSPDHQGKGLGSAVVLPGVEAAERAGVPAFLETSAPRNLPFYERLGFTVTADVEVPEGPRTWCMTRKPGA

SEQ ID NO: 22563 - protein, 851 aa, Artificial Sequence
  Synthetic Polypeptide
MALPVTALLLPLALLLHAARPDIQMTQSPSSLSASVGDRVTITCRASQDISSYLNWYQQKPGKAPKLLIYYTSRLHSGVPSRFSGSGSGTDFTLTISSLQPEDFATYYCQQGNTLPYTFGQGTKVEIKRLEDLKNVFPPEVAVFEPSKAEIAHTQKATLVCLATGFYPDHVELSWWVNGKEVHSGVCTDPQPLKEQPALNDSRYCLSSRLRVSATFWQNPRNHFRCQVQFYGLSENDEWTQDRAKPVTQIVSAEAWGRADCGITSASYHQGVLSATILYEILLGKATLYAVLVSALVLMAMVKRKDSRGRAKRSGSGATNFSLLKQAGDVEENPGPTSMDWIWRILFLVGAATGAHSFEEVQLVESGGGLVQPGGSLRLSCAASGYTFSDYFMSWVRQAPGKGLEWVATISNGGTYTYYPDSVKGRFTISRDNSKNTLYLQMNSLRAEDTAVYYCARFDGYIFDYWGQGTLVTVSSTRIQNPDPAVYQLRDSKSSDKSVCLFTDFDSQTNVSQSKDSDVYITDKCVLDMRSMDFKSNSAVAWSNKSDFACANAFNNSIIPEDTFFPSSDVPCDVKLVEKSFETDTNLNFQNLSVIGFRILLLKVAGFNLLMTLRLWSSRAKRSGSGVKQTLNFDLLKLAGDVESNPGPSRGHMTEYKPTVRLATRDDVPRAVRTLAAAFADYPATRHTVDPDRHIERVTELQELFLTRVGLDIGKVWVADDGAAVAVWTTPESVEAGAVFAEIGPRMAELSGSRLAAQQQMEGLLAPHRPKEPAWFLATVGVSPDHQGKGLGSAVVLPGVEAAERAGVPAFLETSAPRNLPFYERLGFTVTADVEVPEGPRTWCMTRKPGA

SEQ ID NO: 22564 - protein, 618 aa, Artificial Sequence
  Synthetic Polypeptide
MALPVTALLLPLALLLHAARPDIQMTQSPSSLSASVGDRVTITCRASQDISSYLNWYQQKPGKAPKLLIYYTSRLHSGVPSRFSGSGSGTDFTLTISSLQPEDFATYYCQQGNTLPYTFGQGTKVEIKRLEDLKNVFPPEVAVFEPSEAEISHTQKATLVCLATGFYPDHVELSWWVNGKEVHSGVCTDPQPLKEQPALNDSRYCLSSRLRVSATFWQNPRNHFRCQVQFYGLSENDEWTQDRAKPVTQIVSAEAWGRADCGFTSESYQQGVLSATILYEILLGKATLYAVLVSALVLMAMVKRKDSRGRAKRSGSGATNFSLLKQAGDVEENPGPTSMDWIWRILFLVGAATGAHSFEEVQLVESGGGLVQPGGSLRLSCAASGYTFSDYFMSWVRQAPGKGLEWVATISNGGTYTYYPDSVKGRFTISRDNSKNTLYLQMNSLRAEDTAVYYCARFDGYIFDYWGQGTLVTVSSTRIQNPDPAVYQLRDSKSSDKSVCLFTDFDSQTNVSQSKDSDVYITDKCVLDMRSMDFKSNSAVAWSNKSDFACANAFNNSIIPEDTFFPSPESSCDVKLVEKSFETDTNLNFQNLSVIGFRILLLKVAGFNLLMTLRLWSS

SEQ ID NO: 22565 - protein, 622 aa, Artificial Sequence
  Synthetic Polypeptide
MALPVTALLLPLALLLHAARPDIQMTQSPSSLSASVGDRVTITCRASQDISSYLNWYQQKPGKAPKLLIYYTSRLHSGVPSRFSGSGSGTDFTLTISSLQPEDFATYYCQQGNTLPYTFGQGTKVEIKRLEIQNPDPAVYQLRDSKSSDKSVCLFTDFDSQTNVSQSKDSDVYITDKCVLDMRSMDFKSNSAVAWSNKSDFACANAFNNSIIPEDTFFPSPESSCDVKLVEKSFETDTNLNFQNLSVIGFRILLLKVAGFNLLMTLRLWSSRAKRSGSGVKQTLNFDLLKLAGDVESNPGPTSMDWIWRILFLVGAATGAHSFEEVQLVESGGGLVQPGGSLRLSCAASGYTFSDYFMSWVRQAPGKGLEWVATISNGGTYTYYPDSVKGRFTISRDNSKNTLYLQMNSLRAEDTAVYYCARFDGYIFDYWGQGTLVTVSSTREDLKNVFPPEVAVFEPSEAEISHTQKATLVCLATGFYPDHVELSWWVNGKEVHSGVCTDPQPLKEQPALNDSRYCLSSRLRVSATFWQNPRNHFRCQVQFYGLSENDEWTQDRAKPVTQIVSAEAWGRADCGFTSESYQQGVLSATILYEILLGKATLYAVLVSALVLMAMVKRKDSRG

SEQ ID NO: 22566 - protein, 896 aa, Artificial Sequence
  Synthetic Polypeptide
MALPVTALLLPLALLLHAARPLEGKPIPNPLLGLDSTGSGEDLKNVFPPEVAVFEPSKAEIAHTQKATLVCLATGFYPDHVELSWWVNGKEVHSGVCTDPQPLKEQPALNDSRYCLSSRLRVSATFWQNPRNHFRCQVQFYGLSENDEWTQDRAKPVTQIVSAEAWGRADCGITSASYHQGVLSATILYEILLGKATLYAVLVSALVLMAMVKRKDSRGRAKRSGSGATNFSLLKQAGDVEENPGPTSMALPVTALLLPLALLLHAARPDIQMTQSPSSLSASVGDRVTITCRASQDISSYLNWYQQKPGKAPKLLIYYTSRLHSGVPSRFSGSGSGTDFTLTISSLQPEDFATYYCQQGNTLPYTFGQGTKVEIKRGGGGSGGGGSGGGGSEVQLVESGGGLVQPGGSLRLSCAASGYTFSDYFMSWVRQAPGKGLEWVATISNGGTYTYYPDSVKGRFTISRDNSKNTLYLQMNSLRAEDTAVYYCARFDGYIFDYWGQGTLVTVSSTREQKLISEEDGSGIQNPDPAVYQLRDSKSSDKSVCLFTDFDSQTNVSQSKDSDVYITDKCVLDMRSMDFKSNSAVAWSNKSDFACANAFNNSIIPEDTFFPSSDVPCDVKLVEKSFETDTNLNFQNLSVIGFRILLLKVAGFNLLMTLRLWSSRAKRSGSGVKQTLNFDLLKLAGDVESNPGPSRGHMTEYKPTVRLATRDDVPRAVRTLAAAFADYPATRHTVDPDRHIERVTELQELFLTRVGLDIGKVWVADDGAAVAVWTTPESVEAGAVFAEIGPRMAELSGSRLAAQQQMEGLLAPHRPKEPAWFLATVGVSPDHQGKGLGSAVVLPGVEAAERAGVPAFLETSAPRNLPFYERLGFTVTADVEVPEGPRTWCMTRKPGA

SEQ ID NO: 22567 - protein, 888 aa, Artificial Sequence
  Synthetic Polypeptide
MALPVTALLLPLALLLHAARPDIQMTQSPSSLSASVGDRVTITCRASQDISSYLNWYQQKPGKAPKLLIYYTSRLHSGVPSRFSGSGSGTDFTLTISSLQPEDFATYYCQQGNTLPYTFGQGTKVEIKRLEGKPIPNPLLGLDSTGSGDKQLDADVSPKPTIFLPSIAETKLQKAGTYLCLLEKFFPDVIKIHWQEKKSNTILGSQEGNTMKTNDTYMKFSWLTVPEKSLDKEHRCIVRHENNKNGVDQEIIFPPIKTDVITMDPKDNCSKDANDTLLLQLTNTSAYYMYLLLLLKSVVYFAIITCCLLRRTAFCCNGEKSRAKRSGSGATNFSLLKQAGDVEENPGPTSMDWIWRILFLVGAATGAHSFEEVQLVESGGGLVQPGGSLRLSCAASGYTFSDYFMSWVRQAPGKGLEWVATISNGGTYTYYPDSVKGRFTISRDNSKNTLYLQMNSLRAEDTAVYYCARFDGYIFDYWGQGTLVTVSSTREQKLISEEDGSGSQPHTKPSVFVMKNGTNVACLVKEFYPKDIRINLVSSKKITEFDPAIVISPSGKYNAVKLGKYEDSNSVTCSVQHDNKTVHSTDFEVKTDSTDHVKPKETENTKQPSKSCHKPKAIVHTEKVNMMSLTVLGLRMLFAKTVAVNFLLTAKLFFLRAKRSGSGVKQTLNFDLLKLAGDVESNPGPSRGHMTEYKPTVRLATRDDVPRAVRTLAAAFADYPATRHTVDPDRHIERVTELQELFLTRVGLDIGKVWVADDGAAVAVWTTPESVEAGAVFAEIGPRMAELSGSRLAAQQQMEGLLAPHRPKEPAWFLATVGVSPDHQGKGLGSAVVLPGVEAAERAGVPAFLETSAPRNLPFYERLGFTVTADVEVPEGPRTWCMTRKPGA

SEQ ID NO: 22568 - protein, 626 aa, Artificial Sequence
  Synthetic Polypeptide
MALPVTALLLPLALLLHAARPDIQMTQSPSSLSASVGDRVTITCRASQDISSYLNWYQQKPGKAPKLLIYYTSRLHSGVPSRFSGSGSGTDFTLTISSLQPEDFATYYCQQGNTLPYTFGQGTKVEIKRLESQPHTKPSVFVMKNGTNVACLVKEFYPKDIRINLVSSKKITEFDPAIVISPSGKYNAVKLGKYEDSNSVTCSVQHDNKTVHSTDFEVKTDSTDHVKPKETENTKQPSKSCHKPKAIVHTEKVNMMSLTVLGLRMLFAKTVAVNFLLTAKLFFLRAKRSGSGATNFSLLKQAGDVEENPGPTSMDWIWRILFLVGAATGAHSFEEVQLVESGGGLVQPGGSLRLSCAASGYTFSDYFMSWVRQAPGKGLEWVATISNGGTYTYYPDSVKGRFTISRDNSKNTLYLQMNSLRAEDTAVYYCARFDGYIFDYWGQGTLVTVSSTRDKQLDADVSPKPTIFLPSIAETKLQKAGTYLCLLEKFFPDVIKIHWQEKKSNTILGSQEGNTMKTNDTYMKFSWLTVPEKSLDKEHRCIVRHENNKNGVDQEIIFPPIKTDVITMDPKDNCSKDANDTLLLQLTNTSAYYMYLLLLLKSVVYFAIITCCLLRRTAFCCNGEKS

SEQ ID NO: 22569 - protein, 903 aa, Artificial Sequence
  Synthetic Polypeptide
MALPVTALLLPLALLLHAARPLEGKPIPNPLLGLDSTGSGDKQLDADVSPKPTIFLPSIAETKLQKAGTYLCLLEKFFPDVIKIHWQEKKSNTILGSQEGNTMKTNDTYMKFSWLTVPEKSLDKEHRCIVRHENNKNGVDQEIIFPPIKTDVITMDPKDNCSKDANDTLLLQLTNTSAYYMYLLLLLKSVVYFAIITCCLLRRTAFCCNGEKSRAKRSGSGATNFSLLKQAGDVEENPGPTSMALPVTALLLPLALLLHAARPDIQMTQSPSSLSASVGDRVTITCRASQDISSYLNWYQQKPGKAPKLLIYYTSRLHSGVPSRFSGSGSGTDFTLTISSLQPEDFATYYCQQGNTLPYTFGQGTKVEIKRGGGGSGGGGSGGGGSEVQLVESGGGLVQPGGSLRLSCAASGYTFSDYFMSWVRQAPGKGLEWVATISNGGTYTYYPDSVKGRFTISRDNSKNTLYLQMNSLRAEDTAVYYCARFDGYIFDYWGQGTLVTVSSTREQKLISEEDGSGSQPHTKPSVFVMKNGTNVACLVKEFYPKDIRINLVSSKKITEFDPAIVISPSGKYNAVKLGKYEDSNSVTCSVQHDNKTVHSTDFEVKTDSTDHVKPKETENTKQPSKSCHKPKAIVHTEKVNMMSLTVLGLRMLFAKTVAVNFLLTAKLFFLRAKRSGSGVKQTLNFDLLKLAGDVESNPGPSRGHMTEYKPTVRLATRDDVPRAVRTLAAAFADYPATRHTVDPDRHIERVTELQELFLTRVGLDIGKVWVADDGAAVAVWTTPESVEAGAVFAEIGPRMAELSGSRLAAQQQMEGLLAPHRPKEPAWFLATVGVSPDHQGKGLGSAVVLPGVEAAERAGVPAFLETSAPRNLPFYERLGFTVTADVEVPEGPRTWCMTRKPGA

SEQ ID NO: 22570 - protein, 1028 aa, Artificial Sequence
  Synthetic Polypeptide
MALPVTALLLPLALLLHAARPDIQMTQSPSSLSASVGDRVTITCRASQDISSYLNWYQQKPGKAPKLLIYYTSRLHSGVPSRFSGSGSGTDFTLTISSLQPEDFATYYCQQGNTLPYTFGQGTKVEIKRGQPKANPTVTLFPPSSEELQANKATLVCLISDFYPGAVTVAWKADGSPVKAGVETTKPSKQSNNKYAASSYLSLTPEQWKSHRSYSCQVTHEGSTVEKTVAPTECSGSQSFGLLDPKLCYLLDGILFIYGVILTALFLRVKFSRSADAPAYQQGQNQLYNELNLGRREEYDVLDKRRGRDPEMGGKPQRRKNPQEGLYNELQKDKMAEAYSEIGMKGERRRGKGHDGLYQGLSTATKDTYDALHMQALPPRRAKRSGSGATNFSLLKQAGDVEENPGPTSMDWIWRILFLVGAATGAHSFEEVQLVESGGGLVQPGGSLRLSCAASGYTFSDYFMSWVRQAPGKGLEWVATISNGGTYTYYPDSVKGRFTISRDNSKNTLYLQMNSLRAEDTAVYYCARFDGYIFDYWGQGTLVTVSSASTKGPSVFPLAPSSKSTSGGTAALGCLVKDYFPEPVTVSWNSGALTSGVHTFPAVLQSSGLYSLSSVVTVPSSSLGTQTYICNVNHKPSNTKVDKRVEPKSCGTQSFGLLDPKLCYLLDGILFIYGVILTALFLRVKFSRSADAPAYQQGQNQLYNELNLGRREEYDVLDKRRGRDPEMGGKPQRRKNPQEGLYNELQKDKMAEAYSEIGMKGERRRGKGHDGLYQGLSTATKDTYDALHMQALPPRRAKRSGSGVKQTLNFDLLKLAGDVESNPGPSRGHMTEYKPTVRLATRDDVPRAVRTLAAAFADYPATRHTVDPDRHIERVTELQELFLTRVGLDIGKVWVADDGAAVAVWTTPESVEAGAVFAEIGPRMAELSGSRLAAQQQMEGLLAPHRPKEPAWFLATVGVSPDHQGKGLGSAVVLPGVEAAERAGVPAFLETSAPRNLPFYERLGFTVTADVEVPEGPRTWCMTRKPGA

SEQ ID NO: 22571 - protein, 644 aa, Artificial Sequence
  Synthetic Polypeptide
MALPVTALLLPLALLLHAARPDIQMTQSPSSLSASVGDRVTITCRASQDISSYLNWYQQKPGKAPKLLIYYTSRLHSGVPSRFSGSGSGTDFTLTISSLQPEDFATYYCQQGNTLPYTFGQGTKVEIKRLEGQPKANPTVTLFPPSSEELQANKATLVCLISDFYPGAVTVAWKADGSPVKAGVETTKPSKQSNNKYAASSYLSLTPEQWKSHRSYSCQVTHEGSTVEKTVAPTECSPIKTDVITMDPKDNCSKDANDTLLLQLTNTSAYYMYLLLLLKSVVYFAIITCCLLRRTAFCCNGEKSRAKRSGSGATNFSLLKQAGDVEENPGPTSMDWIWRILFLVGAATGAHSFEEVQLVESGGGLVQPGGSLRLSCAASGYTFSDYFMSWVRQAPGKGLEWVATISNGGTYTYYPDSVKGRFTISRDNSKNTLYLQMNSLRAEDTAVYYCARFDGYIFDYWGQGTLVTVSSTRASTKGPSVFPLAPSSKSTSGGTAALGCLVKDYFPEPVTVSWNSGALTSGVHTFPAVLQSSGLYSLSSVVTVPSSSLGTQTYICNVNHKPSNTKVDKRVEPKSCEVKTDSTDHVKPKETENTKQPSKSCHKPKAIVHTEKVNMMSLTVLGLRMLFAKTVAVNFLLTAKLFFL

SEQ ID NO: 22572 - protein, 622 aa, Artificial Sequence
  Synthetic Polypeptide
MALPVTALLLPLALLLHAARPDIQMTQSPSSLSASVGDRVTITCRASQDISSYLNWYQQKPGKAPKLLIYYTSRLHSGVPSRFSGSGSGTDFTLTISSLQPEDFATYYCQQGNTLPYTFGQGTKVEIKRLEGQPKANPTVTLFPPSSEELQANKATLVCLISDFYPGAVTVAWKADGSPVKAGVETTKPSKQSNNKYAASSYLSLTPEQWKSHRSYSCQVTHEGSTVEKTVAPTECSGRADCGFTSESYQQGVLSATILYEILLGKATLYAVLVSALVLMAMVKRKDSRGRAKRSGSGATNFSLLKQAGDVEENPGPTSMDWIWRILFLVGAATGAHSFEEVQLVESGGGLVQPGGSLRLSCAASGYTFSDYFMSWVRQAPGKGLEWVATISNGGTYTYYPDSVKGRFTISRDNSKNTLYLQMNSLRAEDTAVYYCARFDGYIFDYWGQGTLVTVSSTRASTKGPSVFPLAPSSKSTSGGTAALGCLVKDYFPEPVTVSWNSGALTSGVHTFPAVLQSSGLYSLSSVVTVPSSSLGTQTYICNVNHKPSNTKVDKRVEPKSCIPEDTFFPSPESSCDVKLVEKSFETDTNLNFQNLSVIGFRILLLKVAGFNLLMTLRLWSS

SEQ ID NO: 22573 - protein, 448 aa, Artificial Sequence
  Synthetic Polypeptide
MALPVTALLLPLALLLHAARPDIQMTQSPSSLSASVGDRVTITCRASQDISSYLNWYQQKPGKAPKLLIYYTSRLHSGVPSRFSGSGSGTDFTLTISSLQPEDFATYYCQQGNTLPYTFGQGTKVEIKRGGGGSGGGGSGGGGSEVQLVESGGGLVQPGGSLRLSCAASGYTFSDYFMSWVRQAPGKGLEWVATISNGGTYTYYPDSVKGRFTISRDNSKNTLYLQMNSLRAEDTAVYYCARFDGYIFDYWGQGTLVTVSSTRDGNEEMGGITQTPYKVSISGTTVILTCPQYPGSEILWQHNDKNIGGDEDDKNIGSDEDHLSLKEFSELEQSGYYVCYPRGSKPEDANFYLYLRARVCENCMEMDVMSVATIVIVDICITGGLLLLVYYWSKNRKAKAKPVTRGAGAGGRQRGQNKERPPPVPNPDYEPIRKGQRDLYSGLNQRRI

SEQ ID NO: 22574 - protein, 413 aa, Artificial Sequence
  Synthetic Polypeptide
MALPVTALLLPLALLLHAARPDIQMTQSPSSLSASVGDRVTITCRASQDISSYLNWYQQKPGKAPKLLIYYTSRLHSGVPSRFSGSGSGTDFTLTISSLQPEDFATYYCQQGNTLPYTFGQGTKVEIKRGGGGSGGGGSGGGGSEVQLVESGGGLVQPGGSLRLSCAASGYTFSDYFMSWVRQAPGKGLEWVATISNGGTYTYYPDSVKGRFTISRDNSKNTLYLQMNSLRAEDTAVYYCARFDGYIFDYWGQGTLVTVSSTRFKIPIEELEDRVFVNCNTSITWVEGTVGTLLSDITRLDLGKRILDPRGIYRCNGTDIYKDKESTVQVHYRMCQSCVELDPATVAGIIVTDVIATLLLALGVFCFAGHETGRLSGAADTQALLRNDQVYQPLRDRDDAQYSHLGGNWARNK

SEQ ID NO: 22575 - protein, 423 aa, Artificial Sequence
  Synthetic Polypeptide
MALPVTALLLPLALLLHAARPDIQMTQSPSSLSASVGDRVTITCRASQDISSYLNWYQQKPGKAPKLLIYYTSRLHSGVPSRFSGSGSGTDFTLTISSLQPEDFATYYCQQGNTLPYTFGQGTKVEIKRGGGGSGGGGSGGGGSEVQLVESGGGLVQPGGSLRLSCAASGYTFSDYFMSWVRQAPGKGLEWVATISNGGTYTYYPDSVKGRFTISRDNSKNTLYLQMNSLRAEDTAVYYCARFDGYIFDYWGQGTLVTVSSTRQSIKGNHLVKVYDYQEDGSVLLTCDAEAKNITWFKDGKMIGFLTEDKKKWNLGSNAKDPRGMYQCKGSQNKSKPLQVYYRMCQNCIELNAATISGFLFAEIVSIFVLAVGVYFIAGQDGVRQSRASDKQTLLPNDQLYQPLKDREDDQYSHLQGNQLRRN

SEQ ID NO: 22576 - protein, 753 aa, Artificial Sequence
  Synthetic Polypeptide
MALPVTALLLPLALLLHAARPEVQLVESGGGLVQPGGSLRLSCAASGFSFSDFWMSWVRQAPGKGLEWVATISQAGSEKDYVDSVKGRFTISRDNAKKSLYLQMNSLRAEDTAVYYCASGVYSFDYRGQGTLVTVSSGTGGGGSGGGGSGGGGSEFDIQMTQSPSSLSASVGDRVTITCRASQDISSYLNWYQQKPGKAPKLLIYYTSRLHSGVPSRFSGSGSGTDFTLTISSLQPEDFATYYCQQGNTLPYTFGQGTKVEIKRLEDLKNVFPPEVAVFEPSEAEISHTQKATLVCLATGFYPDHVELSWWVNGKEVHSGVCTDPQPLKEQPALNDSRYCLSSRLRVSATFWQNPRNHFRCQVQFYGLSENDEWTQDRAKPVTQIVSAEAWGRADCGFTSESYQQGVLSATILYEILLGKATLYAVLVSALVLMAMVKRKDSRGRAKRSGSGATNFSLLKQAGDVEENPGPTSMDWIWRILFLVGAATGAHSFEEVQLVESGGGLVQPGGSLRLSCAASGYTFSDYFMSWVRQAPGKGLEWVATISNGGTYTYYPDSVKGRFTISRDNSKNTLYLQMNSLRAEDTAVYYCARFDGYIFDYWGQGTLVTVSSTRIQNPDPAVYQLRDSKSSDKSVCLFTDFDSQTNVSQSKDSDVYITDKCVLDMRSMDFKSNSAVAWSNKSDFACANAFNNSIIPEDTFFPSPESSCDVKLVEKSFETDTNLNFQNLSVIGFRILLLKVAGFNLLMTLRLWSS

SEQ ID NO: 22577 - protein, 779 aa, Artificial Sequence
  Synthetic Polypeptide
MALPVTALLLPLALLLHAARPEVQLVESGGGLVQPGGSLRLSCAASGFSFSDFWMSWVRQAPGKGLEWVATISQAGSEKDYVDSVKGRFTISRDNAKKSLYLQMNSLRAEDTAVYYCASGVYSFDYRGQGTLVTVSSGTGGGGSGGGGSGGGGSEFDIQMTQSPSSLSASVGDRVTITCRASQDISSYLNWYQQKPGKAPKLLIYYTSRLHSGVPSRFSGSGSGTDFTLTISSLQPEDFATYYCQQGNTLPYTFGQGTKVEIKRLEGQPKANPTVTLFPPSSEELQANKATLVCLISDFYPGAVTVAWKADGSPVKAGVETTKPSKQSNNKYAASSYLSLTPEQWKSHRSYSCQVTHEGSTVEKTVAPTECSPIKTDVITMDPKDNCSKDANDTLLLQLTNTSAYYMYLLLLLKSVVYFAIITCCLLRRTAFCCNGEKSRAKRSGSGATNFSLLKQAGDVEENPGPTSMDWIWRILFLVGAATGAHSFEEVQLVESGGGLVQPGGSLRLSCAASGYTFSDYFMSWVRQAPGKGLEWVATISNGGTYTYYPDSVKGRFTISRDNSKNTLYLQMNSLRAEDTAVYYCARFDGYIFDYWGQGTLVTVSSTRASTKGPSVFPLAPSSKSTSGGTAALGCLVKDYFPEPVTVSWNSGALTSGVHTFPAVLQSSGLYSLSSVVTVPSSSLGTQTYICNVNHKPSNTKVDKRVEPKSCEVKTDSTDHVKPKETENTKQPSKSCHKPKAIVHTEKVNMMSLTVLGLRMLFAKTVAVNFLLTAKLFFL

SEQ ID NO: 22578 - protein, 760 aa, Artificial Sequence
  Synthetic Polypeptide
MALPVTALLLPLALLLHAARPEVQLVESGGGLVQPGGSLRLSCAASGFSFSDFWMSWVRQAPGKGLEWVATISQAGSEKDYVDSVKGRFTISRDNAKKSLYLQMNSLRAEDTAVYYCASGVYSFDYRGQGTLVTVSSGTGGGGSGGGGSGGGGSEFDIQMTQSPSSLSASVGDRVTITCRASQDISSYLNWYQQKPGKAPKLLIYYTSRLHSGVPSRFSGSGSGTDFTLTISSLQPEDFATYYCQQGNTLPYTFGQGTKVEIKRLEGQPKANPTVTLFPPSSEELQANKATLVCLISDFYPGAVTVAWKADGSPVKAGVETTKPSKQSNNKYAASSYLSLTPEQWKSHRSYSCQVTHEGSTVEKTVAPTECSGRADCGFTSESYQQGVLSATILYEILLGKATLYAVLVSALVLMAMVKRKDSRGRAKRSGSGVKQTLNFDLLKLAGDVESNPGPTSMDWIWRILFLVGAATGAHSFEEVQLVESGGGLVQPGGSLRLSCAASGYTFSDYFMSWVRQAPGKGLEWVATISNGGTYTYYPDSVKGRFTISRDNSKNTLYLQMNSLRAEDTAVYYCARFDGYIFDYWGQGTLVTVSSTRASTKGPSVFPLAPSSKSTSGGTAALGCLVKDYFPEPVTVSWNSGALTSGVHTFPAVLQSSGLYSLSSVVTVPSSSLGTQTYICNVNHKPSNTKVDKRVEPKSCIPEDTFFPSPESSCDVKLVEKSFETDTNLNFQNLSVIGFRILLLKVAGFNLLMTLRLWSS

SEQ ID NO: 22579 - protein, 894 aa, Artificial Sequence
  Synthetic Polypeptide
MALPVTALLLPLALLLHAARPEVQLVESGGGLVQPGGSLRLSCAASGFSFSDFWMSWVRQAPGKGLEWVATISQAGSEKDYVDSVKGRFTISRDNAKKSLYLQMNSLRAEDTAVYYCASGVYSFDYRGQGTLVTVSSGTGGGGSGGGGSGGGGSEFDIQMTQSPSSLSASVGDRVTITCRASQDISSYLNWYQQKPGKAPKLLIYYTSRLHSGVPSRFSGSGSGTDFTLTISSLQPEDFATYYCQQGNTLPYTFGQGTKVEIKRLEIQNPDPAVYQLRDSKSSDKSVCLFTDFDSQTNVSQSKDSDVYITDKCVLDMRSMDFKSNSAVAWSNKSDFACANAFNNSIIPEDTFFPSPESSCDVKLVEKSFETDTNLNFQNLSVIGFRILLLKVAGFNLLMTLRLWSSRAKRSGSGVKQTLNFDLLKLAGDVESNPGPTSMDWIWRILFLVGAATGAHSGPQLQLQESGPGLVKPSETLSLTCTVSGDSISSGDYYWGWIRQPPGKGLEWIGHIYYSGVTYYNPSLKSRVTISVDTSRNQFSLKLSSVTAADTAVYYCTREDSSNWRSRGQGTLVTVSSGSGGGGSGGGGSGGGGSFEEVQLVESGGGLVQPGGSLRLSCAASGYTFSDYFMSWVRQAPGKGLEWVATISNGGTYTYYPDSVKGRFTISRDNSKNTLYLQMNSLRAEDTAVYYCARFDGYIFDYWGQGTLVTVSSTREDLKNVFPPEVAVFEPSEAEISHTQKATLVCLATGFYPDHVELSWWVNGKEVHSGVCTDPQPLKEQPALNDSRYCLSSRLRVSATFWQNPRNHFRCQVQFYGLSENDEWTQDRAKPVTQIVSAEAWGRADCGFTSESYQQGVLSATILYEILLGKATLYAVLVSALVLMAMVKRKDSRG

SEQ ID NO: 22580 - protein, 916 aa, Artificial Sequence
  Synthetic Polypeptide
MALPVTALLLPLALLLHAARPEVQLVESGGGLVQPGGSLRLSCAASGFSFSDFWMSWVRQAPGKGLEWVATISQAGSEKDYVDSVKGRFTISRDNAKKSLYLQMNSLRAEDTAVYYCASGVYSFDYRGQGTLVTVSSGTGGGGSGGGGSGGGGSEFDIQMTQSPSSLSASVGDRVTITCRASQDISSYLNWYQQKPGKAPKLLIYYTSRLHSGVPSRFSGSGSGTDFTLTISSLQPEDFATYYCQQGNTLPYTFGQGTKVEIKRLEGQPKANPTVTLFPPSSEELQANKATLVCLISDFYPGAVTVAWKADGSPVKAGVETTKPSKQSNNKYAASSYLSLTPEQWKSHRSYSCQVTHEGSTVEKTVAPTECSPIKTDVITMDPKDNCSKDANDTLLLQLTNTSAYYMYLLLLLKSVVYFAIITCCLLRRTAFCCNGEKSRAKRSGSGATNFSLLKQAGDVEENPGPTSMDWIWRILFLVGAATGAHSGPQLQLQESGPGLVKPSETLSLTCTVSGDSISSGDYYWGWIRQPPGKGLEWIGHIYYSGVTYYNPSLKSRVTISVDTSRNQFSLKLSSVTAADTAVYYCTREDSSNWRSRGQGTLVTVSSGSGGGGSGGGGSGGGGSFEEVQLVESGGGLVQPGGSLRLSCAASGYTFSDYFMSWVRQAPGKGLEWVATISNGGTYTYYPDSVKGRFTISRDNSKNTLYLQMNSLRAEDTAVYYCARFDGYIFDYWGQGTLVTVSSTRASTKGPSVFPLAPSSKSTSGGTAALGCLVKDYFPEPVTVSWNSGALTSGVHTFPAVLQSSGLYSLSSVVTVPSSSLGTQTYICNVNHKPSNTKVDKRVEPKSCEVKTDSTDHVKPKETENTKQPSKSCHKPKAIVHTEKVNMMSLTVLGLRMLFAKTVAVNFLLTAKLFFL

SEQ ID NO: 22581 - protein, 897 aa, Artificial Sequence
  Synthetic Polypeptide
MALPVTALLLPLALLLHAARPEVQLVESGGGLVQPGGSLRLSCAASGFSFSDFWMSWVRQAPGKGLEWVATISQAGSEKDYVDSVKGRFTISRDNAKKSLYLQMNSLRAEDTAVYYCASGVYSFDYRGQGTLVTVSSGTGGGGSGGGGSGGGGSEFDIQMTQSPSSLSASVGDRVTITCRASQDISSYLNWYQQKPGKAPKLLIYYTSRLHSGVPSRFSGSGSGTDFTLTISSLQPEDFATYYCQQGNTLPYTFGQGTKVEIKRLEGQPKANPTVTLFPPSSEELQANKATLVCLISDFYPGAVTVAWKADGSPVKAGVETTKPSKQSNNKYAASSYLSLTPEQWKSHRSYSCQVTHEGSTVEKTVAPTECSGRADCGFTSESYQQGVLSATILYEILLGKATLYAVLVSALVLMAMVKRKDSRGRAKRSGSGVKQTLNFDLLKLAGDVESNPGPTSMDWIWRILFLVGAATGAHSGPQLQLQESGPGLVKPSETLSLTCTVSGDSISSGDYYWGWIRQPPGKGLEWIGHIYYSGVTYYNPSLKSRVTISVDTSRNQFSLKLSSVTAADTAVYYCTREDSSNWRSRGQGTLVTVSSGSGGGGSGGGGSGGGGSFEEVQLVESGGGLVQPGGSLRLSCAASGYTFSDYFMSWVRQAPGKGLEWVATISNGGTYTYYPDSVKGRFTISRDNSKNTLYLQMNSLRAEDTAVYYCARFDGYIFDYWGQGTLVTVSSTRASTKGPSVFPLAPSSKSTSGGTAALGCLVKDYFPEPVTVSWNSGALTSGVHTFPAVLQSSGLYSLSSVVTVPSSSLGTQTYICNVNHKPSNTKVDKRVEPKSCIPEDTFFPSPESSCDVKLVEKSFETDTNLNFQNLSVIGFRILLLKVAGFNLLMTLRLWSS

SEQ ID NO: 22582 - protein, 481 aa, Artificial Sequence
  Synthetic Polypeptide
MALPVTALLLPLALLLHAARPEVQLVESGGGLVQPGGSLRLSCAASGFDFSRYWMSWVRQAPGKGLEWIGEINPDSSTINYTPSLKDKFIISRDNAKNSLYLQMNSLRAEDTAVYYCARPDGNYWYFDVWGQGTLVTVSSGGGGSGGGGSGGGGSITCKASQDVGIAVAWYQQKPGKVPKLLIYWASTRHTGVPDRFSGSGSGTDFTLTISSLQPEDVATYYCQQYSSYPYTFGQGTKVEIKRTREQKLISEEDLAKPTTTPAPRPPTPAPTIASQPLSLRPEACRPAAGGAVHTRGLDFACDIYIWAPLAGTCGVLLLSLVITLYCKRGRKKLLYIFKQPFMRPVQTTQEEDGCSCRFPEEEEGGCELRVKFSRSADAPAYQQGQNQLYNELNLGRREEYDVLDKRRGRDPEMGGKPRRKNPQEGLYNELQKDKMAEAYSEIGMKGERRRGKGHDGLYQGLSTATKDTYDALHMQALPPR

SEQ ID NO: 22583 - protein, 834 aa, Artificial Sequence
  Synthetic Polypeptide
MALPVTALLLPLALLLHAARPITCKASQDVGIAVAWYQQKPGKVPKLLIYWASTRHTGVPDRFSGSGSGTDFTLTISSLQPEDVATYYCQQYSSYPYTFGQGTKVEIKRLEIQNPDPAVYQLRDSKSSDKSVCLFTDFDSQTNVSQSKDSDVYITDKCVLDMRSMDFKSNSAVAWSNKSDFACANAFNNSIIPEDTFFPSSDVPCDVKLVEKSFETDTNLNFQNLSVIGFRILLLKVAGFNLLMTLRLWSSRAKRSGSGVKQTLNFDLLKLAGDVESNPGPTSMDWIWRILFLVGAATGAHSFEEVQLVESGGGLVQPGGSLRLSCAASGFDFSRYWMSWVRQAPGKGLEWIGEINPDSSTINYTPSLKDKFIISRDNAKNSLYLQMNSLRAEDTAVYYCARPDGNYWYFDVWGQGTLVTVSSTREDLKNVFPPEVAVFEPSKAEIAHTQKATLVCLATGFYPDHVELSWWVNGKEVHSGVCTDPQPLKEQPALNDSRYCLSSRLRVSATFWQNPRNHFRCQVQFYGLSENDEWTQDRAKPVTQIVSAEAWGRADCGITSASYHQGVLSATILYEILLGKATLYAVLVSALVLMAMVKRKDSRGRAKRSGSGATNFSLLKQAGDVEENPGPSRGHMTEYKPTVRLATRDDVPRAVRTLAAAFADYPATRHTVDPDRHIERVTELQELFLTRVGLDIGKVWVADDGAAVAVWTTPESVEAGAVFAEIGPRMAELSGSRLAAQQQMEGLLAPHRPKEPAWFLATVGVSPDHQGKGLGSAVVLPGVEAAERAGVPAFLETSAPRNLPFYERLGFTVTADVEVPEGPRTWCMTRKPGA

SEQ ID NO: 22584 - protein, 833 aa, Artificial Sequence
  Synthetic Polypeptide
MALPVTALLLPLALLLHAARPITCKASQDVGIAVAWYQQKPGKVPKLLIYWASTRHTGVPDRFSGSGSGTDFTLTISSLQPEDVATYYCQQYSSYPYTFGQGTKVEIKRLEDLKNVFPPEVAVFEPSKAEIAHTQKATLVCLATGFYPDHVELSWWVNGKEVHSGVCTDPQPLKEQPALNDSRYCLSSRLRVSATFWQNPRNHFRCQVQFYGLSENDEWTQDRAKPVTQIVSAEAWGRADCGITSASYHQGVLSATILYEILLGKATLYAVLVSALVLMAMVKRKDSRGRAKRSGSGATNFSLLKQAGDVEENPGPTSMDWIWRILFLVGAATGAHSFEEVQLVESGGGLVQPGGSLRLSCAASGFDFSRYWMSWVRQAPGKGLEWIGEINPDSSTINYTPSLKDKFIISRDNAKNSLYLQMNSLRAEDTAVYYCARPDGNYWYFDVWGQGTLVTVSSTRIQNPDPAVYQLRDSKSSDKSVCLFTDFDSQTNVSQSKDSDVYITDKCVLDMRSMDFKSNSAVAWSNKSDFACANAFNNSIIPEDTFFPSSDVPCDVKLVEKSFETDTNLNFQNLSVIGFRILLLKVAGFNLLMTLRLWSSRAKRSGSGVKQTLNFDLLKLAGDVESNPGPSRGHMTEYKPTVRLATRDDVPRAVRTLAAAFADYPATRHTVDPDRHIERVTELQELFLTRVGLDIGKVWVADDGAAVAVWTTPESVEAGAVFAEIGPRMAELSGSRLAAQQQMEGLLAPHRPKEPAWFLATVGVSPDHQGKGLGSAVVLPGVEAAERAGVPAFLETSAPRNLPFYERLGFTVTADVEVPEGPRTWCMTRKPGA

SEQ ID NO: 22585 - protein, 600 aa, Artificial Sequence
  Synthetic Polypeptide
MALPVTALLLPLALLLHAARPITCKASQDVGIAVAWYQQKPGKVPKLLIYWASTRHTGVPDRFSGSGSGTDFTLTISSLQPEDVATYYCQQYSSYPYTFGQGTKVEIKRLEDLKNVFPPEVAVFEPSEAEISHTQKATLVCLATGFYPDHVELSWWVNGKEVHSGVCTDPQPLKEQPALNDSRYCLSSRLRVSATFWQNPRNHFRCQVQFYGLSENDEWTQDRAKPVTQIVSAEAWGRADCGFTSESYQQGVLSATILYEILLGKATLYAVLVSALVLMAMVKRKDSRGRAKRSGSGATNFSLLKQAGDVEENPGPTSMDWIWRILFLVGAATGAHSFEEVQLVESGGGLVQPGGSLRLSCAASGFDFSRYWMSWVRQAPGKGLEWIGEINPDSSTINYTPSLKDKFIISRDNAKNSLYLQMNSLRAEDTAVYYCARPDGNYWYFDVWGQGTLVTVSSTRIQNPDPAVYQLRDSKSSDKSVCLFTDFDSQTNVSQSKDSDVYITDKCVLDMRSMDFKSNSAVAWSNKSDFACANAFNNSIIPEDTFFPSPESSCDVKLVEKSFETDTNLNFQNLSVIGFRILLLKVAGFNLLMTLRLWSS

SEQ ID NO: 22586 - protein, 604 aa, Artificial Sequence
  Synthetic Polypeptide
MALPVTALLLPLALLLHAARPITCKASQDVGIAVAWYQQKPGKVPKLLIYWASTRHTGVPDRFSGSGSGTDFTLTISSLQPEDVATYYCQQYSSYPYTFGQGTKVEIKRLEIQNPDPAVYQLRDSKSSDKSVCLFTDFDSQTNVSQSKDSDVYITDKCVLDMRSMDFKSNSAVAWSNKSDFACANAFNNSIIPEDTFFPSPESSCDVKLVEKSFETDTNLNFQNLSVIGFRILLLKVAGFNLLMTLRLWSSRAKRSGSGVKQTLNFDLLKLAGDVESNPGPTSMDWIWRILFLVGAATGAHSFEEVQLVESGGGLVQPGGSLRLSCAASGFDFSRYWMSWVRQAPGKGLEWIGEINPDSSTINYTPSLKDKFIISRDNAKNSLYLQMNSLRAEDTAVYYCARPDGNYWYFDVWGQGTLVTVSSTREDLKNVFPPEVAVFEPSEAEISHTQKATLVCLATGFYPDHVELSWWVNGKEVHSGVCTDPQPLKEQPALNDSRYCLSSRLRVSATFWQNPRNHFRCQVQFYGLSENDEWTQDRAKPVTQIVSAEAWGRADCGFTSESYQQGVLSATILYEILLGKATLYAVLVSALVLMAMVKRKDSRG

SEQ ID NO: 22587 - protein, 878 aa, Artificial Sequence
  Synthetic Polypeptide
MALPVTALLLPLALLLHAARPLEGKPIPNPLLGLDSTGSGEDLKNVFPPEVAVFEPSKAEIAHTQKATLVCLATGFYPDHVELSWWVNGKEVHSGVCTDPQPLKEQPALNDSRYCLSSRLRVSATFWQNPRNHFRCQVQFYGLSENDEWTQDRAKPVTQIVSAEAWGRADCGITSASYHQGVLSATILYEILLGKATLYAVLVSALVLMAMVKRKDSRGRAKRSGSGATNFSLLKQAGDVEENPGPTSMALPVTALLLPLALLLHAARPITCKASQDVGIAVAWYQQKPGKVPKLLIYWASTRHTGVPDRFSGSGSGTDFTLTISSLQPEDVATYYCQQYSSYPYTFGQGTKVEIKRGGGGSGGGGSGGGGSEVQLVESGGGLVQPGGSLRLSCAASGFDFSRYWMSWVRQAPGKGLEWIGEINPDSSTINYTPSLKDKFIISRDNAKNSLYLQMNSLRAEDTAVYYCARPDGNYWYFDVWGQGTLVTVSSTREQKLISEEDGSGIQNPDPAVYQLRDSKSSDKSVCLFTDFDSQTNVSQSKDSDVYITDKCVLDMRSMDFKSNSAVAWSNKSDFACANAFNNSIIPEDTFFPSSDVPCDVKLVEKSFETDTNLNFQNLSVIGFRILLLKVAGFNLLMTLRLWSSRAKRSGSGVKQTLNFDLLKLAGDVESNPGPSRGHMTEYKPTVRLATRDDVPRAVRTLAAAFADYPATRHTVDPDRHIERVTELQELFLTRVGLDIGKVWVADDGAAVAVWTTPESVEAGAVFAEIGPRMAELSGSRLAAQQQMEGLLAPHRPKEPAWFLATVGVSPDHQGKGLGSAVVLPGVEAAERAGVPAFLETSAPRNLPFYERLGFTVTADVEVPEGPRTWCMTRKPGA

SEQ ID NO: 22588 - protein, 870 aa, Artificial Sequence
  Synthetic Polypeptide
MALPVTALLLPLALLLHAARPITCKASQDVGIAVAWYQQKPGKVPKLLIYWASTRHTGVPDRFSGSGSGTDFTLTISSLQPEDVATYYCQQYSSYPYTFGQGTKVEIKRLEGKPIPNPLLGLDSTGSGDKQLDADVSPKPTIFLPSIAETKLQKAGTYLCLLEKFFPDVIKIHWQEKKSNTILGSQEGNTMKTNDTYMKFSWLTVPEKSLDKEHRCIVRHENNKNGVDQEIIFPPIKTDVITMDPKDNCSKDANDTLLLQLTNTSAYYMYLLLLLKSVVYFAIITCCLLRRTAFCCNGEKSRAKRSGSGATNFSLLKQAGDVEENPGPTSMDWIWRILFLVGAATGAHSFEEVQLVESGGGLVQPGGSLRLSCAASGFDFSRYWMSWVRQAPGKGLEWIGEINPDSSTINYTPSLKDKFIISRDNAKNSLYLQMNSLRAEDTAVYYCARPDGNYWYFDVWGQGTLVTVSSTREQKLISEEDGSGSQPHTKPSVFVMKNGTNVACLVKEFYPKDIRINLVSSKKITEFDPAIVISPSGKYNAVKLGKYEDSNSVTCSVQHDNKTVHSTDFEVKTDSTDHVKPKETENTKQPSKSCHKPKAIVHTEKVNMMSLTVLGLRMLFAKTVAVNFLLTAKLFFLRAKRSGSGVKQTLNFDLLKLAGDVESNPGPSRGHMTEYKPTVRLATRDDVPRAVRTLAAAFADYPATRHTVDPDRHIERVTELQELFLTRVGLDIGKVWVADDGAAVAVWTTPESVEAGAVFAEIGPRMAELSGSRLAAQQQMEGLLAPHRPKEPAWFLATVGVSPDHQGKGLGSAVVLPGVEAAERAGVPAFLETSAPRNLPFYERLGFTVTADVEVPEGPRTWCMTRKPGA

SEQ ID NO: 22589 - protein, 608 aa, Artificial Sequence
  Synthetic Polypeptide
MALPVTALLLPLALLLHAARPITCKASQDVGIAVAWYQQKPGKVPKLLIYWASTRHTGVPDRFSGSGSGTDFTLTISSLQPEDVATYYCQQYSSYPYTFGQGTKVEIKRLESQPHTKPSVFVMKNGTNVACLVKEFYPKDIRINLVSSKKITEFDPAIVISPSGKYNAVKLGKYEDSNSVTCSVQHDNKTVHSTDFEVKTDSTDHVKPKETENTKQPSKSCHKPKAIVHTEKVNMMSLTVLGLRMLFAKTVAVNFLLTAKLFFLRAKRSGSGATNFSLLKQAGDVEENPGPTSMDWIWRILFLVGAATGAHSFEEVQLVESGGGLVQPGGSLRLSCAASGFDFSRYWMSWVRQAPGKGLEWIGEINPDSSTINYTPSLKDKFIISRDNAKNSLYLQMNSLRAEDTAVYYCARPDGNYWYFDVWGQGTLVTVSSTRDKQLDADVSPKPTIFLPSIAETKLQKAGTYLCLLEKFFPDVIKIHWQEKKSNTILGSQEGNTMKTNDTYMKFSWLTVPEKSLDKEHRCIVRHENNKNGVDQEIIFPPIKTDVITMDPKDNCSKDANDTLLLQLTNTSAYYMYLLLLLKSVVYFAIITCCLLRRTAFCCNGEKS

SEQ ID NO: 22590 - protein, 885 aa, Artificial Sequence
  Synthetic Polypeptide
MALPVTALLLPLALLLHAARPLEGKPIPNPLLGLDSTGSGDKQLDADVSPKPTIFLPSIAETKLQKAGTYLCLLEKFFPDVIKIHWQEKKSNTILGSQEGNTMKTNDTYMKFSWLTVPEKSLDKEHRCIVRHENNKNGVDQEIIFPPIKTDVITMDPKDNCSKDANDTLLLQLTNTSAYYMYLLLLLKSVVYFAIITCCLLRRTAFCCNGEKSRAKRSGSGATNFSLLKQAGDVEENPGPTSMALPVTALLLPLALLLHAARPITCKASQDVGIAVAWYQQKPGKVPKLLIYWASTRHTGVPDRFSGSGSGTDFTLTISSLQPEDVATYYCQQYSSYPYTFGQGTKVEIKRGGGGSGGGGSGGGGSEVQLVESGGGLVQPGGSLRLSCAASGFDFSRYWMSWVRQAPGKGLEWIGEINPDSSTINYTPSLKDKFIISRDNAKNSLYLQMNSLRAEDTAVYYCARPDGNYWYFDVWGQGTLVTVSSTREQKLISEEDGSGSQPHTKPSVFVMKNGTNVACLVKEFYPKDIRINLVSSKKITEFDPAIVISPSGKYNAVKLGKYEDSNSVTCSVQHDNKTVHSTDFEVKTDSTDHVKPKETENTKQPSKSCHKPKAIVHTEKVNMMSLTVLGLRMLFAKTVAVNFLLTAKLFFLRAKRSGSGVKQTLNFDLLKLAGDVESNPGPSRGHMTEYKPTVRLATRDDVPRAVRTLAAAFADYPATRHTVDPDRHIERVTELQELFLTRVGLDIGKVWVADDGAAVAVWTTPESVEAGAVFAEIGPRMAELSGSRLAAQQQMEGLLAPHRPKEPAWFLATVGVSPDHQGKGLGSAVVLPGVEAAERAGVPAFLETSAPRNLPFYERLGFTVTADVEVPEGPRTWCMTRKPGA

SEQ ID NO: 22591 - protein, 1010 aa, Artificial Sequence
  Synthetic Polypeptide
MALPVTALLLPLALLLHAARPITCKASQDVGIAVAWYQQKPGKVPKLLIYWASTRHTGVPDRFSGSGSGTDFTLTISSLQPEDVATYYCQQYSSYPYTFGQGTKVEIKRGQPKANPTVTLFPPSSEELQANKATLVCLISDFYPGAVTVAWKADGSPVKAGVETTKPSKQSNNKYAASSYLSLTPEQWKSHRSYSCQVTHEGSTVEKTVAPTECSGSQSFGLLDPKLCYLLDGILFIYGVILTALFLRVKFSRSADAPAYQQGQNQLYNELNLGRREEYDVLDKRRGRDPEMGGKPQRRKNPQEGLYNELQKDKMAEAYSEIGMKGERRRGKGHDGLYQGLSTATKDTYDALHMQALPPRRAKRSGSGATNFSLLKQAGDVEENPGPTSMDWIWRILFLVGAATGAHSFEEVQLVESGGGLVQPGGSLRLSCAASGFDFSRYWMSWVRQAPGKGLEWIGEINPDSSTINYTPSLKDKFIISRDNAKNSLYLQMNSLRAEDTAVYYCARPDGNYWYFDVWGQGTLVTVSSASTKGPSVFPLAPSSKSTSGGTAALGCLVKDYFPEPVTVSWNSGALTSGVHTFPAVLQSSGLYSLSSVVTVPSSSLGTQTYICNVNHKPSNTKVDKRVEPKSCGTQSFGLLDPKLCYLLDGILFIYGVILTALFLRVKFSRSADAPAYQQGQNQLYNELNLGRREEYDVLDKRRGRDPEMGGKPQRRKNPQEGLYNELQKDKMAEAYSEIGMKGERRRGKGHDGLYQGLSTATKDTYDALHMQALPPRRAKRSGSGVKQTLNFDLLKLAGDVESNPGPSRGHMTEYKPTVRLATRDDVPRAVRTLAAAFADYPATRHTVDPDRHIERVTELQELFLTRVGLDIGKVWVADDGAAVAVWTTPESVEAGAVFAEIGPRMAELSGSRLAAQQQMEGLLAPHRPKEPAWFLATVGVSPDHQGKGLGSAVVLPGVEAAERAGVPAFLETSAPRNLPFYERLGFTVTADVEVPEGPRTWCMTRKPGA

SEQ ID NO: 22592 - protein, 626 aa, Artificial Sequence
  Synthetic Polypeptide
MALPVTALLLPLALLLHAARPITCKASQDVGIAVAWYQQKPGKVPKLLIYWASTRHTGVPDRFSGSGSGTDFTLTISSLQPEDVATYYCQQYSSYPYTFGQGTKVEIKRLEGQPKANPTVTLFPPSSEELQANKATLVCLISDFYPGAVTVAWKADGSPVKAGVETTKPSKQSNNKYAASSYLSLTPEQWKSHRSYSCQVTHEGSTVEKTVAPTECSPIKTDVITMDPKDNCSKDANDTLLLQLTNTSAYYMYLLLLLKSVVYFAIITCCLLRRTAFCCNGEKSRAKRSGSGATNFSLLKQAGDVEENPGPTSMDWIWRILFLVGAATGAHSFEEVQLVESGGGLVQPGGSLRLSCAASGFDFSRYWMSWVRQAPGKGLEWIGEINPDSSTINYTPSLKDKFIISRDNAKNSLYLQMNSLRAEDTAVYYCARPDGNYWYFDVWGQGTLVTVSSTRASTKGPSVFPLAPSSKSTSGGTAALGCLVKDYFPEPVTVSWNSGALTSGVHTFPAVLQSSGLYSLSSVVTVPSSSLGTQTYICNVNHKPSNTKVDKRVEPKSCEVKTDSTDHVKPKETENTKQPSKSCHKPKAIVHTEKVNMMSLTVLGLRMLFAKTVAVNFLLTAKLFFL

SEQ ID NO: 22593 - protein, 604 aa, Artificial Sequence
  Synthetic Polypeptide
MALPVTALLLPLALLLHAARPITCKASQDVGIAVAWYQQKPGKVPKLLIYWASTRHTGVPDRFSGSGSGTDFTLTISSLQPEDVATYYCQQYSSYPYTFGQGTKVEIKRLEGQPKANPTVTLFPPSSEELQANKATLVCLISDFYPGAVTVAWKADGSPVKAGVETTKPSKQSNNKYAASSYLSLTPEQWKSHRSYSCQVTHEGSTVEKTVAPTECSGRADCGFTSESYQQGVLSATILYEILLGKATLYAVLVSALVLMAMVKRKDSRGRAKRSGSGATNFSLLKQAGDVEENPGPTSMDWIWRILFLVGAATGAHSFEEVQLVESGGGLVQPGGSLRLSCAASGFDFSRYWMSWVRQAPGKGLEWIGEINPDSSTINYTPSLKDKFIISRDNAKNSLYLQMNSLRAEDTAVYYCARPDGNYWYFDVWGQGTLVTVSSTRASTKGPSVFPLAPSSKSTSGGTAALGCLVKDYFPEPVTVSWNSGALTSGVHTFPAVLQSSGLYSLSSVVTVPSSSLGTQTYICNVNHKPSNTKVDKRVEPKSCIPEDTFFPSPESSCDVKLVEKSFETDTNLNFQNLSVIGFRILLLKVAGFNLLMTLRLWSS

SEQ ID NO: 22594 - protein, 430 aa, Artificial Sequence
  Synthetic Polypeptide
MALPVTALLLPLALLLHAARPITCKASQDVGIAVAWYQQKPGKVPKLLIYWASTRHTGVPDRFSGSGSGTDFTLTISSLQPEDVATYYCQQYSSYPYTFGQGTKVEIKRGGGGSGGGGSGGGGSEVQLVESGGGLVQPGGSLRLSCAASGFDFSRYWMSWVRQAPGKGLEWIGEINPDSSTINYTPSLKDKFIISRDNAKNSLYLQMNSLRAEDTAVYYCARPDGNYWYFDVWGQGTLVTVSSTRDGNEEMGGITQTPYKVSISGTTVILTCPQYPGSEILWQHNDKNIGGDEDDKNIGSDEDHLSLKEFSELEQSGYYVCYPRGSKPEDANFYLYLRARVCENCMEMDVMSVATIVIVDICITGGLLLLVYYWSKNRKAKAKPVTRGAGAGGRQRGQNKERPPPVPNPDYEPIRKGQRDLYSGLNQRRI

SEQ ID NO: 22595 - protein, 395 aa, Artificial Sequence
  Synthetic Polypeptide
MALPVTALLLPLALLLHAARPITCKASQDVGIAVAWYQQKPGKVPKLLIYWASTRHTGVPDRFSGSGSGTDFTLTISSLQPEDVATYYCQQYSSYPYTFGQGTKVEIKRGGGGSGGGGSGGGGSEVQLVESGGGLVQPGGSLRLSCAASGFDFSRYWMSWVRQAPGKGLEWIGEINPDSSTINYTPSLKDKFIISRDNAKNSLYLQMNSLRAEDTAVYYCARPDGNYWYFDVWGQGTLVTVSSTRFKIPIEELEDRVFVNCNTSITWVEGTVGTLLSDITRLDLGKRILDPRGIYRCNGTDIYKDKESTVQVHYRMCQSCVELDPATVAGIIVTDVIATLLLALGVFCFAGHETGRLSGAADTQALLRNDQVYQPLRDRDDAQYSHLGGNWARNK

SEQ ID NO: 22596 - protein, 405 aa, Artificial Sequence
  Synthetic Polypeptide
MALPVTALLLPLALLLHAARPITCKASQDVGIAVAWYQQKPGKVPKLLIYWASTRHTGVPDRFSGSGSGTDFTLTISSLQPEDVATYYCQQYSSYPYTFGQGTKVEIKRGGGGSGGGGSGGGGSEVQLVESGGGLVQPGGSLRLSCAASGFDFSRYWMSWVRQAPGKGLEWIGEINPDSSTINYTPSLKDKFIISRDNAKNSLYLQMNSLRAEDTAVYYCARPDGNYWYFDVWGQGTLVTVSSTRQSIKGNHLVKVYDYQEDGSVLLTCDAEAKNITWFKDGKMIGFLTEDKKKWNLGSNAKDPRGMYQCKGSQNKSKPLQVYYRMCQNCIELNAATISGFLFAEIVSIFVLAVGVYFIAGQDGVRQSRASDKQTLLPNDQLYQPLKDREDDQYSHLQGNQLRRN

SEQ ID NO: 22597 - protein, 735 aa, Artificial Sequence
  Synthetic Polypeptide
MALPVTALLLPLALLLHAARPEVQLVESGGGLVQPGGSLRLSCAASGFSFSDFWMSWVRQAPGKGLEWVATISQAGSEKDYVDSVKGRFTISRDNAKKSLYLQMNSLRAEDTAVYYCASGVYSFDYRGQGTLVTVSSGTGGGGSGGGGSGGGGSEFITCKASQDVGIAVAWYQQKPGKVPKLLIYWASTRHTGVPDRFSGSGSGTDFTLTISSLQPEDVATYYCQQYSSYPYTFGQGTKVEIKRLEDLKNVFPPEVAVFEPSEAEISHTQKATLVCLATGFYPDHVELSWWVNGKEVHSGVCTDPQPLKEQPALNDSRYCLSSRLRVSATFWQNPRNHFRCQVQFYGLSENDEWTQDRAKPVTQIVSAEAWGRADCGFTSESYQQGVLSATILYEILLGKATLYAVLVSALVLMAMVKRKDSRGRAKRSGSGATNFSLLKQAGDVEENPGPTSMDWIWRILFLVGAATGAHSFEEVQLVESGGGLVQPGGSLRLSCAASGFDFSRYWMSWVRQAPGKGLEWIGEINPDSSTINYTPSLKDKFIISRDNAKNSLYLQMNSLRAEDTAVYYCARPDGNYWYFDVWGQGTLVTVSSTRIQNPDPAVYQLRDSKSSDKSVCLFTDFDSQTNVSQSKDSDVYITDKCVLDMRSMDFKSNSAVAWSNKSDFACANAFNNSIIPEDTFFPSPESSCDVKLVEKSFETDTNLNFQNLSVIGFRILLLKVAGFNLLMTLRLWSS

SEQ ID NO: 22598 - protein, 761 aa, Artificial Sequence
  Synthetic Polypeptide
MALPVTALLLPLALLLHAARPEVQLVESGGGLVQPGGSLRLSCAASGFSFSDFWMSWVRQAPGKGLEWVATISQAGSEKDYVDSVKGRFTISRDNAKKSLYLQMNSLRAEDTAVYYCASGVYSFDYRGQGTLVTVSSGTGGGGSGGGGSGGGGSEFITCKASQDVGIAVAWYQQKPGKVPKLLIYWASTRHTGVPDRFSGSGSGTDFTLTISSLQPEDVATYYCQQYSSYPYTFGQGTKVEIKRLEGQPKANPTVTLFPPSSEELQANKATLVCLISDFYPGAVTVAWKADGSPVKAGVETTKPSKQSNNKYAASSYLSLTPEQWKSHRSYSCQVTHEGSTVEKTVAPTECSPIKTDVITMDPKDNCSKDANDTLLLQLTNTSAYYMYLLLLLKSVVYFAIITCCLLRRTAFCCNGEKSRAKRSGSGATNFSLLKQAGDVEENPGPTSMDWIWRILFLVGAATGAHSFEEVQLVESGGGLVQPGGSLRLSCAASGFDFSRYWMSWVRQAPGKGLEWIGEINPDSSTINYTPSLKDKFIISRDNAKNSLYLQMNSLRAEDTAVYYCARPDGNYWYFDVWGQGTLVTVSSTRASTKGPSVFPLAPSSKSTSGGTAALGCLVKDYFPEPVTVSWNSGALTSGVHTFPAVLQSSGLYSLSSVVTVPSSSLGTQTYICNVNHKPSNTKVDKRVEPKSCEVKTDSTDHVKPKETENTKQPSKSCHKPKAIVHTEKVNMMSLTVLGLRMLFAKTVAVNFLLTAKLFFL

SEQ ID NO: 22599 - protein, 742 aa, Artificial Sequence
  Synthetic Polypeptide
MALPVTALLLPLALLLHAARPEVQLVESGGGLVQPGGSLRLSCAASGFSFSDFWMSWVRQAPGKGLEWVATISQAGSEKDYVDSVKGRFTISRDNAKKSLYLQMNSLRAEDTAVYYCASGVYSFDYRGQGTLVTVSSGTGGGGSGGGGSGGGGSEFITCKASQDVGIAVAWYQQKPGKVPKLLIYWASTRHTGVPDRFSGSGSGTDFTLTISSLQPEDVATYYCQQYSSYPYTFGQGTKVEIKRLEGQPKANPTVTLFPPSSEELQANKATLVCLISDFYPGAVTVAWKADGSPVKAGVETTKPSKQSNNKYAASSYLSLTPEQWKSHRSYSCQVTHEGSTVEKTVAPTECSGRADCGFTSESYQQGVLSATILYEILLGKATLYAVLVSALVLMAMVKRKDSRGRAKRSGSGVKQTLNFDLLKLAGDVESNPGPTSMDWIWRILFLVGAATGAHSFEEVQLVESGGGLVQPGGSLRLSCAASGFDFSRYWMSWVRQAPGKGLEWIGEINPDSSTINYTPSLKDKFIISRDNAKNSLYLQMNSLRAEDTAVYYCARPDGNYWYFDVWGQGTLVTVSSTRASTKGPSVFPLAPSSKSTSGGTAALGCLVKDYFPEPVTVSWNSGALTSGVHTFPAVLQSSGLYSLSSVVTVPSSSLGTQTYICNVNHKPSNTKVDKRVEPKSCIPEDTFFPSPESSCDVKLVEKSFETDTNLNFQNLSVIGFRILLLKVAGFNLLMTLRLWSS

SEQ ID NO: 22600 - protein, 876 aa, Artificial Sequence
  Synthetic Polypeptide
MALPVTALLLPLALLLHAARPEVQLVESGGGLVQPGGSLRLSCAASGFSFSDFWMSWVRQAPGKGLEWVATISQAGSEKDYVDSVKGRFTISRDNAKKSLYLQMNSLRAEDTAVYYCASGVYSFDYRGQGTLVTVSSGTGGGGSGGGGSGGGGSEFITCKASQDVGIAVAWYQQKPGKVPKLLIYWASTRHTGVPDRFSGSGSGTDFTLTISSLQPEDVATYYCQQYSSYPYTFGQGTKVEIKRLEIQNPDPAVYQLRDSKSSDKSVCLFTDFDSQTNVSQSKDSDVYITDKCVLDMRSMDFKSNSAVAWSNKSDFACANAFNNSIIPEDTFFPSPESSCDVKLVEKSFETDTNLNFQNLSVIGFRILLLKVAGFNLLMTLRLWSSRAKRSGSGVKQTLNFDLLKLAGDVESNPGPTSMDWIWRILFLVGAATGAHSGPQLQLQESGPGLVKPSETLSLTCTVSGDSISSGDYYWGWIRQPPGKGLEWIGHIYYSGVTYYNPSLKSRVTISVDTSRNQFSLKLSSVTAADTAVYYCTREDSSNWRSRGQGTLVTVSSGSGGGGSGGGGSGGGGSFEEVQLVESGGGLVQPGGSLRLSCAASGFDFSRYWMSWVRQAPGKGLEWIGEINPDSSTINYTPSLKDKFIISRDNAKNSLYLQMNSLRAEDTAVYYCARPDGNYWYFDVWGQGTLVTVSSTREDLKNVFPPEVAVFEPSEAEISHTQKATLVCLATGFYPDHVELSWWVNGKEVHSGVCTDPQPLKEQPALNDSRYCLSSRLRVSATFWQNPRNHFRCQVQFYGLSENDEWTQDRAKPVTQIVSAEAWGRADCGFTSESYQQGVLSATILYEILLGKATLYAVLVSALVLMAMVKRKDSRG

SEQ ID NO: 22601 - protein, 898 aa, Artificial Sequence
  Synthetic Polypeptide
MALPVTALLLPLALLLHAARPEVQLVESGGGLVQPGGSLRLSCAASGFSFSDFWMSWVRQAPGKGLEWVATISQAGSEKDYVDSVKGRFTISRDNAKKSLYLQMNSLRAEDTAVYYCASGVYSFDYRGQGTLVTVSSGTGGGGSGGGGSGGGGSEFITCKASQDVGIAVAWYQQKPGKVPKLLIYWASTRHTGVPDRFSGSGSGTDFTLTISSLQPEDVATYYCQQYSSYPYTFGQGTKVEIKRLEGQPKANPTVTLFPPSSEELQANKATLVCLISDFYPGAVTVAWKADGSPVKAGVETTKPSKQSNNKYAASSYLSLTPEQWKSHRSYSCQVTHEGSTVEKTVAPTECSPIKTDVITMDPKDNCSKDANDTLLLQLTNTSAYYMYLLLLLKSVVYFAIITCCLLRRTAFCCNGEKSRAKRSGSGATNFSLLKQAGDVEENPGPTSMDWIWRILFLVGAATGAHSGPQLQLQESGPGLVKPSETLSLTCTVSGDSISSGDYYWGWIRQPPGKGLEWIGHIYYSGVTYYNPSLKSRVTISVDTSRNQFSLKLSSVTAADTAVYYCTREDSSNWRSRGQGTLVTVSSGSGGGGSGGGGSGGGGSFEEVQLVESGGGLVQPGGSLRLSCAASGFDFSRYWMSWVRQAPGKGLEWIGEINPDSSTINYTPSLKDKFIISRDNAKNSLYLQMNSLRAEDTAVYYCARPDGNYWYFDVWGQGTLVTVSSTRASTKGPSVFPLAPSSKSTSGGTAALGCLVKDYFPEPVTVSWNSGALTSGVHTFPAVLQSSGLYSLSSVVTVPSSSLGTQTYICNVNHKPSNTKVDKRVEPKSCEVKTDSTDHVKPKETENTKQPSKSCHKPKAIVHTEKVNMMSLTVLGLRMLFAKTVAVNFLLTAKLFFL

SEQ ID NO: 22602 - protein, 879 aa, Artificial Sequence
  Synthetic Polypeptide
MALPVTALLLPLALLLHAARPEVQLVESGGGLVQPGGSLRLSCAASGFSFSDFWMSWVRQAPGKGLEWVATISQAGSEKDYVDSVKGRFTISRDNAKKSLYLQMNSLRAEDTAVYYCASGVYSFDYRGQGTLVTVSSGTGGGGSGGGGSGGGGSEFITCKASQDVGIAVAWYQQKPGKVPKLLIYWASTRHTGVPDRFSGSGSGTDFTLTISSLQPEDVATYYCQQYSSYPYTFGQGTKVEIKRLEGQPKANPTVTLFPPSSEELQANKATLVCLISDFYPGAVTVAWKADGSPVKAGVETTKPSKQSNNKYAASSYLSLTPEQWKSHRSYSCQVTHEGSTVEKTVAPTECSGRADCGFTSESYQQGVLSATILYEILLGKATLYAVLVSALVLMAMVKRKDSRGRAKRSGSGVKQTLNFDLLKLAGDVESNPGPTSMDWIWRILFLVGAATGAHSGPQLQLQESGPGLVKPSETLSLTCTVSGDSISSGDYYWGWIRQPPGKGLEWIGHIYYSGVTYYNPSLKSRVTISVDTSRNQFSLKLSSVTAADTAVYYCTREDSSNWRSRGQGTLVTVSSGSGGGGSGGGGSGGGGSFEEVQLVESGGGLVQPGGSLRLSCAASGFDFSRYWMSWVRQAPGKGLEWIGEINPDSSTINYTPSLKDKFIISRDNAKNSLYLQMNSLRAEDTAVYYCARPDGNYWYFDVWGQGTLVTVSSTRASTKGPSVFPLAPSSKSTSGGTAALGCLVKDYFPEPVTVSWNSGALTSGVHTFPAVLQSSGLYSLSSVVTVPSSSLGTQTYICNVNHKPSNTKVDKRVEPKSCIPEDTFFPSPESSCDVKLVEKSFETDTNLNFQNLSVIGFRILLLKVAGFNLLMTLRLWSS

SEQ ID NO: 22603 - protein, 849 aa, Artificial Sequence
  Synthetic Polypeptide
MALPVTALLLPLALLLHAARPQAVVTQEPSLTVSPGGTVTLTCGSSTGAVTTSNYASWVQEKPDHLFRGLIGGTNNRAPGVPARFSGSLLGGKAALTISGAQPEDEAIYFCVLWYSDHWVFGGGTKLTVDLEIQNPDPAVYQLRDSKSSDKSVCLFTDFDSQTNVSQSKDSDVYITDKCVLDMRSMDFKSNSAVAWSNKSDFACANAFNNSIIPEDTFFPSSDVPCDVKLVEKSFETDTNLNFQNLSVIGFRILLLKVAGFNLLMTLRLWSSRAKRSGSGVKQTLNFDLLKLAGDVESNPGPTSMDWIWRILFLVGAATGAHSFEQVQLQQSGPGLVKPSETLSITCTVSGFLLTDYGVNWVRQPPGKGLEWLGVIWGDGITDYNPSLKSRLTVSKDTSKNQVSLKMSSLTDADTARYYCVTGLFDYWGQGTTLTVSSTREDLKNVFPPEVAVFEPSKAEIAHTQKATLVCLATGFYPDHVELSWWVNGKEVHSGVCTDPQPLKEQPALNDSRYCLSSRLRVSATFWQNPRNHFRCQVQFYGLSENDEWTQDRAKPVTQIVSAEAWGRADCGITSASYHQGVLSATILYEILLGKATLYAVLVSALVLMAMVKRKDSRGRAKRSGSGATNFSLLKQAGDVEENPGPSRGHMTEYKPTVRLATRDDVPRAVRTLAAAFADYPATRHTVDPDRHIERVTELQELFLTRVGLDIGKVWVADDGAAVAVWTTPESVEAGAVFAEIGPRMAELSGSRLAAQQQMEGLLAPHRPKEPAWFLATVGVSPDHQGKGLGSAVVLPGVEAAERAGVPAFLETSAPRNLPFYERLGFTVTADVEVPEGPRTWCMTRKPGA

SEQ ID NO: 22604 - protein, 848 aa, Artificial Sequence
  Synthetic Polypeptide
MALPVTALLLPLALLLHAARPQAVVTQEPSLTVSPGGTVTLTCGSSTGAVTTSNYASWVQEKPDHLFRGLIGGTNNRAPGVPARFSGSLLGGKAALTISGAQPEDEAIYFCVLWYSDHWVFGGGTKLTVDLEDLKNVFPPEVAVFEPSKAEIAHTQKATLVCLATGFYPDHVELSWWVNGKEVHSGVCTDPQPLKEQPALNDSRYCLSSRLRVSATFWQNPRNHFRCQVQFYGLSENDEWTQDRAKPVTQIVSAEAWGRADCGITSASYHQGVLSATILYEILLGKATLYAVLVSALVLMAMVKRKDSRGRAKRSGSGATNFSLLKQAGDVEENPGPTSMDWIWRILFLVGAATGAHSFEQVQLQQSGPGLVKPSETLSITCTVSGFLLTDYGVNWVRQPPGKGLEWLGVIWGDGITDYNPSLKSRLTVSKDTSKNQVSLKMSSLTDADTARYYCVTGLFDYWGQGTTLTVSSTRIQNPDPAVYQLRDSKSSDKSVCLFTDFDSQTNVSQSKDSDVYITDKCVLDMRSMDFKSNSAVAWSNKSDFACANAFNNSIIPEDTFFPSSDVPCDVKLVEKSFETDTNLNFQNLSVIGFRILLLKVAGFNLLMTLRLWSSRAKRSGSGVKQTLNFDLLKLAGDVESNPGPSRGHMTEYKPTVRLATRDDVPRAVRTLAAAFADYPATRHTVDPDRHIERVTELQELFLTRVGLDIGKVWVADDGAAVAVWTTPESVEAGAVFAEIGPRMAELSGSRLAAQQQMEGLLAPHRPKEPAWFLATVGVSPDHQGKGLGSAVVLPGVEAAERAGVPAFLETSAPRNLPFYERLGFTVTADVEVPEGPRTWCMTRKPGA

SEQ ID NO: 22605 - protein, 615 aa, Artificial Sequence
  Synthetic Polypeptide
MALPVTALLLPLALLLHAARPQAVVTQEPSLTVSPGGTVTLTCGSSTGAVTTSNYASWVQEKPDHLFRGLIGGTNNRAPGVPARFSGSLLGGKAALTISGAQPEDEAIYFCVLWYSDHWVFGGGTKLTVDLEDLKNVFPPEVAVFEPSEAEISHTQKATLVCLATGFYPDHVELSWWVNGKEVHSGVCTDPQPLKEQPALNDSRYCLSSRLRVSATFWQNPRNHFRCQVQFYGLSENDEWTQDRAKPVTQIVSAEAWGRADCGFTSESYQQGVLSATILYEILLGKATLYAVLVSALVLMAMVKRKDSRGRAKRSGSGATNFSLLKQAGDVEENPGPTSMDWIWRILFLVGAATGAHSFEQVQLQQSGPGLVKPSETLSITCTVSGFLLTDYGVNWVRQPPGKGLEWLGVIWGDGITDYNPSLKSRLTVSKDTSKNQVSLKMSSLTDADTARYYCVTGLFDYWGQGTTLTVSSTRIQNPDPAVYQLRDSKSSDKSVCLFTDFDSQTNVSQSKDSDVYITDKCVLDMRSMDFKSNSAVAWSNKSDFACANAFNNSIIPEDTFFPSPESSCDVKLVEKSFETDTNLNFQNLSVIGFRILLLKVAGFNLLMTLRLWSS

SEQ ID NO: 22606 - protein, 619 aa, Artificial Sequence
  Synthetic Polypeptide
MALPVTALLLPLALLLHAARPQAVVTQEPSLTVSPGGTVTLTCGSSTGAVTTSNYASWVQEKPDHLFRGLIGGTNNRAPGVPARFSGSLLGGKAALTISGAQPEDEAIYFCVLWYSDHWVFGGGTKLTVDLEIQNPDPAVYQLRDSKSSDKSVCLFTDFDSQTNVSQSKDSDVYITDKCVLDMRSMDFKSNSAVAWSNKSDFACANAFNNSIIPEDTFFPSPESSCDVKLVEKSFETDTNLNFQNLSVIGFRILLLKVAGFNLLMTLRLWSSRAKRSGSGVKQTLNFDLLKLAGDVESNPGPTSMDWIWRILFLVGAATGAHSFEQVQLQQSGPGLVKPSETLSITCTVSGFLLTDYGVNWVRQPPGKGLEWLGVIWGDGITDYNPSLKSRLTVSKDTSKNQVSLKMSSLTDADTARYYCVTGLFDYWGQGTTLTVSSTREDLKNVFPPEVAVFEPSEAEISHTQKATLVCLATGFYPDHVELSWWVNGKEVHSGVCTDPQPLKEQPALNDSRYCLSSRLRVSATFWQNPRNHFRCQVQFYGLSENDEWTQDRAKPVTQIVSAEAWGRADCGFTSESYQQGVLSATILYEILLGKATLYAVLVSALVLMAMVKRKDSRG

SEQ ID NO: 22607 - protein, 885 aa, Artificial Sequence
  Synthetic Polypeptide
MALPVTALLLPLALLLHAARPQAVVTQEPSLTVSPGGTVTLTCGSSTGAVTTSNYASWVQEKPDHLFRGLIGGTNNRAPGVPARFSGSLLGGKAALTISGAQPEDEAIYFCVLWYSDHWVFGGGTKLTVDLEGKPIPNPLLGLDSTGSGDKQLDADVSPKPTIFLPSIAETKLQKAGTYLCLLEKFFPDVIKIHWQEKKSNTILGSQEGNTMKTNDTYMKFSWLTVPEKSLDKEHRCIVRHENNKNGVDQEIIFPPIKTDVITMDPKDNCSKDANDTLLLQLTNTSAYYMYLLLLLKSVVYFAIITCCLLRRTAFCCNGEKSRAKRSGSGATNFSLLKQAGDVEENPGPTSMDWIWRILFLVGAATGAHSFEQVQLQQSGPGLVKPSETLSITCTVSGFLLTDYGVNWVRQPPGKGLEWLGVIWGDGITDYNPSLKSRLTVSKDTSKNQVSLKMSSLTDADTARYYCVTGLFDYWGQGTTLTVSSTREQKLISEEDGSGSQPHTKPSVFVMKNGTNVACLVKEFYPKDIRINLVSSKKITEFDPAIVISPSGKYNAVKLGKYEDSNSVTCSVQHDNKTVHSTDFEVKTDSTDHVKPKETENTKQPSKSCHKPKAIVHTEKVNMMSLTVLGLRMLFAKTVAVNFLLTAKLFFLRAKRSGSGVKQTLNFDLLKLAGDVESNPGPSRGHMTEYKPTVRLATRDDVPRAVRTLAAAFADYPATRHTVDPDRHIERVTELQELFLTRVGLDIGKVWVADDGAAVAVWTTPESVEAGAVFAEIGPRMAELSGSRLAAQQQMEGLLAPHRPKEPAWFLATVGVSPDHQGKGLGSAVVLPGVEAAERAGVPAFLETSAPRNLPFYERLGFTVTADVEVPEGPRTWCMTRKPGA

SEQ ID NO: 22608 - protein, 623 aa, Artificial Sequence
  Synthetic Polypeptide
MALPVTALLLPLALLLHAARPQAVVTQEPSLTVSPGGTVTLTCGSSTGAVTTSNYASWVQEKPDHLFRGLIGGTNNRAPGVPARFSGSLLGGKAALTISGAQPEDEAIYFCVLWYSDHWVFGGGTKLTVDLESQPHTKPSVFVMKNGTNVACLVKEFYPKDIRINLVSSKKITEFDPAIVISPSGKYNAVKLGKYEDSNSVTCSVQHDNKTVHSTDFEVKTDSTDHVKPKETENTKQPSKSCHKPKAIVHTEKVNMMSLTVLGLRMLFAKTVAVNFLLTAKLFFLRAKRSGSGATNFSLLKQAGDVEENPGPTSMDWIWRILFLVGAATGAHSFEQVQLQQSGPGLVKPSETLSITCTVSGFLLTDYGVNWVRQPPGKGLEWLGVIWGDGITDYNPSLKSRLTVSKDTSKNQVSLKMSSLTDADTARYYCVTGLFDYWGQGTTLTVSSTRDKQLDADVSPKPTIFLPSIAETKLQKAGTYLCLLEKFFPDVIKIHWQEKKSNTILGSQEGNTMKTNDTYMKFSWLTVPEKSLDKEHRCIVRHENNKNGVDQEIIFPPIKTDVITMDPKDNCSKDANDTLLLQLTNTSAYYMYLLLLLKSVVYFAIITCCLLRRTAFCCNGEKS

SEQ ID NO: 22609-22613 - skipped (5 entries)

SEQ ID NO: 22614 - protein, 750 aa, Artificial Sequence
  Synthetic Polypeptide
MALPVTALLLPLALLLHAARPEVQLVESGGGLVQPGGSLRLSCAASGFSFSDFWMSWVRQAPGKGLEWVATISQAGSEKDYVDSVKGRFTISRDNAKKSLYLQMNSLRAEDTAVYYCASGVYSFDYRGQGTLVTVSSGTGGGGSGGGGSGGGGSEFQAVVTQEPSLTVSPGGTVTLTCGSSTGAVTTSNYASWVQEKPDHLFRGLIGGTNNRAPGVPARFSGSLLGGKAALTISGAQPEDEAIYFCVLWYSDHWVFGGGTKLTVDLEDLKNVFPPEVAVFEPSEAEISHTQKATLVCLATGFYPDHVELSWWVNGKEVHSGVCTDPQPLKEQPALNDSRYCLSSRLRVSATFWQNPRNHFRCQVQFYGLSENDEWTQDRAKPVTQIVSAEAWGRADCGFTSESYQQGVLSATILYEILLGKATLYAVLVSALVLMAMVKRKDSRGRAKRSGSGATNFSLLKQAGDVEENPGPTSMDWIWRILFLVGAATGAHSFEQVQLQQSGPGLVKPSETLSITCTVSGFLLTDYGVNWVRQPPGKGLEWLGVIWGDGITDYNPSLKSRLTVSKDTSKNQVSLKMSSLTDADTARYYCVTGLFDYWGQGTTLTVSSTRIQNPDPAVYQLRDSKSSDKSVCLFTDFDSQTNVSQSKDSDVYITDKCVLDMRSMDFKSNSAVAWSNKSDFACANAFNNSIIPEDTFFPSPESSCDVKLVEKSFETDTNLNFQNLSVIGFRILLLKVAGFNLLMTLRLWSS

SEQ ID NO: 22615 - skipped

SEQ ID NO: 22616 - protein, 9 aa, Artificial Sequence
  Synthetic Polypeptide
GGGGGGGGG

SEQ ID NO: 22617 - protein, 9 aa, Artificial Sequence
  Synthetic Polypeptide
GGGGGGGGG

SEQ ID NO: 22618 - protein, 9 aa, Artificial Sequence
  Synthetic Polypeptide
GGGGGGGGG

SEQ ID NO: 22619 - protein, 9 aa, Artificial Sequence
  Synthetic Polypeptide
GGGGGGGGG

SEQ ID NO: 22620 - protein, 9 aa, Artificial Sequence
  Synthetic Polypeptide
GGGGGGGGG

SEQ ID NO: 22621 - protein, 9 aa, Artificial Sequence
  Synthetic Polypeptide
GGGGGGGGG

SEQ ID NO: 22622 - protein, 622 aa, Artificial Sequence
  Synthetic Polypeptide
MALPVTALLLPLALLLHAARPDIQMTQSPSSLSASVGDRVTITCKASDHINNWLAWYQQKPGQAPKLLIYGATTLETGVPSRFSGSGSGTDYTLTISSLQPEDFATYYCQQSWNTPWTFGQGTKLEIKRLEDLKNVFPPEVAVFEPSEAEISHTQKATLVCLATGFYPDHVELSWWVNGKEVHSGVSTDPQPLKEQPALNDSRYCLSSRLRVSATFWQNPRNHFRCQVQFYGLSENDEWTQDRAKPVTQIVSAEAWGRADCGFTSESYQQGVLSATILYEILLGKATLYAVLVSALVLMAMVKRKDSRGRAKRSGSGATNFSLLKQAGDVEENPGPTSMDWIWRILFLVGAATGAHSFEQVQLQQPGAELVKPGASVKMSCKASGYAFSSYWINWMKQKPGQGLEWIGQIYPGDGDTNYNGKFKGRATLTADTSSSTAYMQLSSLTSEDSAVYFCARSITTVVGCAMDYWGQGTSVTVSSTRIQNPDPAVYQLRDSKSSDKSVCLFTDFDSQTNVSQSKDSDVYITDKTVLDMRSMDFKSNSAVAWSNKSDFACANAFNNSIIPEDTFFPSPESSCDVKLVEKSFETDTNLNFQNLSVIGFRILLLKVAGFNLLMTLRLWSS

SEQ ID NO: 22623 - protein, 759 aa, Artificial Sequence
  Synthetic Polypeptide
MALPVTALLLPLALLLHAARPDIQMTQSPSSLSASVGDRVTITCKASDHINNWLAWYQQKPGQAPKLLIYGATTLETGVPSRFSGSGSGTDYTLTISSLQPEDFATYYCQQSWNTPWTFGQGTKLEIKRLEDLKNVFPPEVAVFEPSEAEISHTQKATLVCLATGFYPDHVELSWWVNGKEVHSGVSTDPQPLKEQPALNDSRYCLSSRLRVSATFWQNPRNHFRCQVQFYGLSENDEWTQDRAKPVTQIVSAEAWGRADCGFTSESYQQGVLSATILYEILLGKATLYAVLVSALVLMAMVKRKDSRGRAKRSGSGATNFSLLKQAGDVEENPGPTSMDWIWRILFLVGAATGAHSGPQVQLQESGGGLAQAGGSLRLSCAASGRTFSMGWFRQAPGKEREFVAAITYSGGSPYYASSVRGRFTISRDNAKNTVYLQMNSLKPEDTAVYYCAANPTYGSDWNAENWGQGTQVTVSSGSGGGGSGGGGSGGGGSFEQVQLQQPGAELVKPGASVKMSCKASGYAFSSYWINWMKQKPGQGLEWIGQIYPGDGDTNYNGKFKGRATLTADTSSSTAYMQLSSLTSEDSAVYFCARSITTVVGCAMDYWGQGTSVTVSSTRIQNPDPAVYQLRDSKSSDKSVCLFTDFDSQTNVSQSKDSDVYITDKTVLDMRSMDFKSNSAVAWSNKSDFACANAFNNSIIPEDTFFPSPESSCDVKLVEKSFETDTNLNFQNLSVIGFRILLLKVAGFNLLMTLRLWSS

SEQ ID NO: 22624 - protein, 896 aa, Artificial Sequence
  Synthetic Polypeptide
MALPVTALLLPLALLLHAARPQLQLQESGPGLVKPSETLSLTCTVSGDSISSGDYYWGWIRQPPGKGLEWIGHIYYSGVTYYNPSLKSRVTISVDTSRNQFSLKLSSVTAADTAVYYCTREDSSNWRSRGQGTLVTVSSGTGGGGSGGGGSGGGGSEFDIQMTQSPSSLSASVGDRVTITCKASDHINNWLAWYQQKPGQAPKLLIYGATTLETGVPSRFSGSGSGTDYTLTISSLQPEDFATYYCQQSWNTPWTFGQGTKLEIKRLEDLKNVFPPEVAVFEPSEAEISHTQKATLVCLATGFYPDHVELSWWVNGKEVHSGVSTDPQPLKEQPALNDSRYCLSSRLRVSATFWQNPRNHFRCQVQFYGLSENDEWTQDRAKPVTQIVSAEAWGRADCGFTSESYQQGVLSATILYEILLGKATLYAVLVSALVLMAMVKRKDSRGRAKRSGSGATNFSLLKQAGDVEENPGPTSMDWIWRILFLVGAATGAHSGPQVQLQESGGGLAQAGGSLRLSCAASGRTFSMGWFRQAPGKEREFVAAITYSGGSPYYASSVRGRFTISRDNAKNTVYLQMNSLKPEDTAVYYCAANPTYGSDWNAENWGQGTQVTVSSGSGGGGSGGGGSGGGGSFEQVQLQQPGAELVKPGASVKMSCKASGYAFSSYWINWMKQKPGQGLEWIGQIYPGDGDTNYNGKFKGRATLTADTSSSTAYMQLSSLTSEDSAVYFCARSITTVVGCAMDYWGQGTSVTVSSTRIQNPDPAVYQLRDSKSSDKSVCLFTDFDSQTNVSQSKDSDVYITDKTVLDMRSMDFKSNSAVAWSNKSDFACANAFNNSIIPEDTFFPSPESSCDVKLVEKSFETDTNLNFQNLSVIGFRILLLKVAGFNLLMTLRLWSS

SEQ ID NO: 22625 - protein, 882 aa, Artificial Sequence
  Synthetic Polypeptide
MALPVTALLLPLALLLHAARPDIQMTQTTSSLSASLGDRVTISCRASQDISKYLNWYQQKPDGTVKLLIYHTSRLHSGVPSRFSGSGSGTDYSLTISNLEQEDIATYFCQQGNTLPYTFGGGTKLEITLEGKPIPNPLLGLDSTGSGEDLKNVFPPEVAVFEPSEAEISHTQKATLVCLATGFYPDHVELSWWVNGKEVHSGVSTDPQPLKEQPALNDSRYCLSSRLRVSATFWQNPRNHFRCQVQFYGLSENDEWTQDRAKPVTQIVSAEAWGRADCGFTSESYQQGVLSATILYEILLGKATLYAVLVSALVLMAMVKRKDSRGRAKRSGSGATNFSLLKQAGDVEENPGPTSMDWIWRILFLVGAATGAHSFEVKLQESGPGLVAPSQSLSVTCTVSGVSLPDYGVSWIRQPPRKGLEWLGVIWGSETTYYNSALKSRLTIIKDNSKSQVFLKMNSLQTDDTAIYYCAKHYYYGGSYAMDYWGQGTSVTVSSTREQKLISEEDGSGIQNPDPAVYQLRDSKSSDKSVCLFTDFDSQTNVSQSKDSDVYITDKTVLDMRSMDFKSNSAVAWSNKSDFACANAFNNSIIPEDTFFPSPESSCDVKLVEKSFETDTNLNFQNLSVIGFRILLLKVAGFNLLMTLRLWSSRAKRSGSGVKQTLNFDLLKLAGDVESNPGPSRGHMTEYKPTVRLATRDDVPRAVRTLAAAFADYPATRHTVDPDRHIERVTELQELFLTRVGLDIGKVWVADDGAAVAVWTTPESVEAGAVFAEIGPRMAELSGSRLAAQQQMEGLLAPHRPKEPAWFLATVGVSPDHQGKGLGSAVVLPGVEAAERAGVPAFLETSAPRNLPFYERLGFTVTADVEVPEGPRTWCMTRKPGA

SEQ ID NO: 22626 - protein, 866 aa, Artificial Sequence
  Synthetic Polypeptide
MALPVTALLLPLALLLHAARPDIQMTQTTSSLSASLGDRVTISCRASQDISKYLNWYQQKPDGTVKLLIYHTSRLHSGVPSRFSGSGSGTDYSLTISNLEQEDIATYFCQQGNTLPYTFGGGTKLEITLEGSGSQPHTKPSVFVMKNGTNVACLVKEFYPKDIRINLVSSKKITEFDPAIVISPSGKYNAVKLGKYEDSNSVTCSVQHDNKTVHSTDFEVKTDSTDHVKPKETENTKQPSKSCHKPKAIVHTEKVNMMSLTVLGLRMLFAKTVAVNFLLTAKLFFLRAKRSGSGVKQTLNFDLLKLAGDVESNPGPTSMDWIWRILFLVGAATGAHSFEVKLQESGPGLVAPSQSLSVTCTVSGVSLPDYGVSWIRQPPRKGLEWLGVIWGSETTYYNSALKSRLTIIKDNSKSQVFLKMNSLQTDDTAIYYCAKHYYYGGSYAMDYWGQGTSVTVSSTRGSGDKQLDADVSPKPTIFLPSIAETKLQKAGTYLCLLEKFFPDVIKIHWQEKKSNTILGSQEGNTMKTNDTYMKFSWLTVPEKSLDKEHRCIVRHENNKNGVDQEIIFPPIKTDVITMDPKDNCSKDANDTLLLQLTNTSAYYMYLLLLLKSVVYFAIITCCLLRRTAFCCNGEKSRAKRSGSGATNFSLLKQAGDVEENPGPSRGHMTEYKPTVRLATRDDVPRAVRTLAAAFADYPATRHTVDPDRHIERVTELQELFLTRVGLDIGKVWVADDGAAVAVWTTPESVEAGAVFAEIGPRMAELSGSRLAAQQQMEGLLAPHRPKEPAWFLATVGVSPDHQGKGLGSAVVLPGVEAAERAGVPAFLETSAPRNLPFYERLGFTVTADVEVPEGPRTWCMTRKPGA

SEQ ID NO: 22627 - protein, 9 aa, Artificial Sequence
  Synthetic Polypeptide
GGGGGGGGG

SEQ ID NO: 22628 - protein, 850 aa, Artificial Sequence
  Synthetic Polypeptide
MALPVTALLLPLALLLHAARPDIQMTQSPSSLSASVGDRVTITCKASDHINNWLAWYQQKPGQAPKLLIYGATTLETGVPSRFSGSGSGTDYTLTISSLQPEDFATYYCQQSWNTPWTFGQGTKLEIKRLEFPPEVAVFEPSEAEISHTQKATLVCLATGFYPDHVELSWWVNGKEVHSGVCTDPQPLKEQPALNDSRYCLSSRLRVSATFWQNPRNHFRCQVQFYGLSENDEWTQDRAKPVTQIVSAEAWGRADCGFTSESYQQGVLSATILYEILLGKATLYAVLVSALVLMAMVKRKDSRGRAKRSGSGATNFSLLKQAGDVEENPGPTSMDWIWRILFLVGAATGAHSFEQVQLQQPGAELVKPGASVKMSCKASGYAFSSYWINWMKQKPGQGLEWIGQIYPGDGDTNYNGKFKGRATLTADTSSSTAYMQLSSLTSEDSAVYFCARSITTVVGCAMDYWGQGTSVTVSSTRIQNPDPAVYQLRDSKSSDKSVCLFTDFDSQTNVSQSKDSDVYITDKCVLDMRSMDFKSNSAVAWSNKSDFACANAFNNSIIPEDTFFPSPESSCDVKLVEKSFETDTNLNFQNLSVIGFRILLLKVAGFNLLMTLRLWSSRAKRSGSGVKQTLNFDLLKLAGDVESNPGPSRAHMTEYKPTVRLATRDDVPRAVRTLAAAFADYPATRHTVDPDRHIERVTELQELFLTRVGLDIGKVWVADDGAAVAVWTTPESVEAGAVFAEIGPRMAELSGSRLAAQQQMEGLLAPHRPKEPAWFLATVGVSPDHQGKGLGSAVVLPGVEAAERAGVPAFLETSAPRNLPFYERLGFTVTADVEVPEGPRTWCMTRKPGA

SEQ ID NO: 22629 - protein, 853 aa, Artificial Sequence
  Synthetic Polypeptide
MALPVTALLLPLALLLHAARPDIQMTQSPSSLSASVGDRVTITCKASDHINNWLAWYQQKPGQAPKLLIYGATTLETGVPSRFSGSGSGTDYTLTISSLQPEDFATYYCQQSWNTPWTFGQGTKLEIKRLEKNVFPPEVAVFEPSEAEISHTQKATLVCLATGFYPDHVELSWWVNGKEVHSGVCTDPQPLKEQPALNDSRYCLSSRLRVSATFWQNPRNHFRCQVQFYGLSENDEWTQDRAKPVTQIVSAEAWGRADCGFTSESYQQGVLSATILYEILLGKATLYAVLVSALVLMAMVKRKDSRGRAKRSGSGATNFSLLKQAGDVEENPGPTSMDWIWRILFLVGAATGAHSFEQVQLQQPGAELVKPGASVKMSCKASGYAFSSYWINWMKQKPGQGLEWIGQIYPGDGDTNYNGKFKGRATLTADTSSSTAYMQLSSLTSEDSAVYFCARSITTVVGCAMDYWGQGTSVTVSSTRIQNPDPAVYQLRDSKSSDKSVCLFTDFDSQTNVSQSKDSDVYITDKCVLDMRSMDFKSNSAVAWSNKSDFACANAFNNSIIPEDTFFPSPESSCDVKLVEKSFETDTNLNFQNLSVIGFRILLLKVAGFNLLMTLRLWSSRAKRSGSGVKQTLNFDLLKLAGDVESNPGPSRAHMTEYKPTVRLATRDDVPRAVRTLAAAFADYPATRHTVDPDRHIERVTELQELFLTRVGLDIGKVWVADDGAAVAVWTTPESVEAGAVFAEIGPRMAELSGSRLAAQQQMEGLLAPHRPKEPAWFLATVGVSPDHQGKGLGSAVVLPGVEAAERAGVPAFLETSAPRNLPFYERLGFTVTADVEVPEGPRTWCMTRKPGA

SEQ ID NO: 22630 - protein, 838 aa, Artificial Sequence
  Synthetic Polypeptide
MALPVTALLLPLALLLHAARPDIQMTQSPSSLSASVGDRVTITCKASDHINNWLAWYQQKPGQAPKLLIYGATTLETGVPSRFSGSGSGTDYTLTISSLQPEDFATYYCQQSWNTPWTFGQGTKLEIKRLEAEISHTQKATLVCLATGFYPDHVELSWWVNGKEVHSGVCTDPQPLKEQPALNDSRYCLSSRLRVSATFWQNPRNHFRCQVQFYGLSENDEWTQDRAKPVTQIVSAEAWGRADCGFTSESYQQGVLSATILYEILLGKATLYAVLVSALVLMAMVKRKDSRGRAKRSGSGATNFSLLKQAGDVEENPGPTSMDWIWRILFLVGAATGAHSFEQVQLQQPGAELVKPGASVKMSCKASGYAFSSYWINWMKQKPGQGLEWIGQIYPGDGDTNYNGKFKGRATLTADTSSSTAYMQLSSLTSEDSAVYFCARSITTVVGCAMDYWGQGTSVTVSSTRIQNPDPAVYQLRDSKSSDKSVCLFTDFDSQTNVSQSKDSDVYITDKCVLDMRSMDFKSNSAVAWSNKSDFACANAFNNSIIPEDTFFPSPESSCDVKLVEKSFETDTNLNFQNLSVIGFRILLLKVAGFNLLMTLRLWSSRAKRSGSGVKQTLNFDLLKLAGDVESNPGPSRAHMTEYKPTVRLATRDDVPRAVRTLAAAFADYPATRHTVDPDRHIERVTELQELFLTRVGLDIGKVWVADDGAAVAVWTTPESVEAGAVFAEIGPRMAELSGSRLAAQQQMEGLLAPHRPKEPAWFLATVGVSPDHQGKGLGSAVVLPGVEAAERAGVPAFLETSAPRNLPFYERLGFTVTADVEVPEGPRTWCMTRKPGA

SEQ ID NO: 22631 - protein, 852 aa, Artificial Sequence
  Synthetic Polypeptide
MALPVTALLLPLALLLHAARPDIQMTQSPSSLSASVGDRVTITCKASDHINNWLAWYQQKPGQAPKLLIYGATTLETGVPSRFSGSGSGTDYTLTISSLQPEDFATYYCQQSWNTPWTFGQGTKLEIKRLENVFPPEVAVFEPSEAEISHTQKATLVCLATGFYPDHVELSWWVNGKEVHSGVCTDPQPLKEQPALNDSRYCLSSRLRVSATFWQNPRNHFRCQVQFYGLSENDEWTQDRAKPVTQIVSAEAWGRADCGFTSESYQQGVLSATILYEILLGKATLYAVLVSALVLMAMVKRKDSRGRAKRSGSGATNFSLLKQAGDVEENPGPTSMDWIWRILFLVGAATGAHSFEQVQLQQPGAELVKPGASVKMSCKASGYAFSSYWINWMKQKPGQGLEWIGQIYPGDGDTNYNGKFKGRATLTADTSSSTAYMQLSSLTSEDSAVYFCARSITTVVGCAMDYWGQGTSVTVSSTRIQNPDPAVYQLRDSKSSDKSVCLFTDFDSQTNVSQSKDSDVYITDKCVLDMRSMDFKSNSAVAWSNKSDFACANAFNNSIIPEDTFFPSPESSCDVKLVEKSFETDTNLNFQNLSVIGFRILLLKVAGFNLLMTLRLWSSRAKRSGSGVKQTLNFDLLKLAGDVESNPGPSRAHMTEYKPTVRLATRDDVPRAVRTLAAAFADYPATRHTVDPDRHIERVTELQELFLTRVGLDIGKVWVADDGAAVAVWTTPESVEAGAVFAEIGPRMAELSGSRLAAQQQMEGLLAPHRPKEPAWFLATVGVSPDHQGKGLGSAVVLPGVEAAERAGVPAFLETSAPRNLPFYERLGFTVTADVEVPEGPRTWCMTRKPGA

SEQ ID NO: 22632 - protein, 846 aa, Artificial Sequence
  Synthetic Polypeptide
MALPVTALLLPLALLLHAARPDIQMTQSPSSLSASVGDRVTITCKASDHINNWLAWYQQKPGQAPKLLIYGATTLETGVPSRFSGSGSGTDYTLTISSLQPEDFATYYCQQSWNTPWTFGQGTKLEIKRLEVAVFEPSEAEISHTQKATLVCLATGFYPDHVELSWWVNGKEVHSGVCTDPQPLKEQPALNDSRYCLSSRLRVSATFWQNPRNHFRCQVQFYGLSENDEWTQDRAKPVTQIVSAEAWGRADCGFTSESYQQGVLSATILYEILLGKATLYAVLVSALVLMAMVKRKDSRGRAKRSGSGATNFSLLKQAGDVEENPGPTSMDWIWRILFLVGAATGAHSFEQVQLQQPGAELVKPGASVKMSCKASGYAFSSYWINWMKQKPGQGLEWIGQIYPGDGDTNYNGKFKGRATLTADTSSSTAYMQLSSLTSEDSAVYFCARSITTVVGCAMDYWGQGTSVTVSSTRIQNPDPAVYQLRDSKSSDKSVCLFTDFDSQTNVSQSKDSDVYITDKCVLDMRSMDFKSNSAVAWSNKSDFACANAFNNSIIPEDTFFPSPESSCDVKLVEKSFETDTNLNFQNLSVIGFRILLLKVAGFNLLMTLRLWSSRAKRSGSGVKQTLNFDLLKLAGDVESNPGPSRAHMTEYKPTVRLATRDDVPRAVRTLAAAFADYPATRHTVDPDRHIERVTELQELFLTRVGLDIGKVWVADDGAAVAVWTTPESVEAGAVFAEIGPRMAELSGSRLAAQQQMEGLLAPHRPKEPAWFLATVGVSPDHQGKGLGSAVVLPGVEAAERAGVPAFLETSAPRNLPFYERLGFTVTADVEVPEGPRTWCMTRKPGA

SEQ ID NO: 22633 - protein, 841 aa, Artificial Sequence
  Synthetic Polypeptide
MALPVTALLLPLALLLHAARPDIQMTQSPSSLSASVGDRVTITCKASDHINNWLAWYQQKPGQAPKLLIYGATTLETGVPSRFSGSGSGTDYTLTISSLQPEDFATYYCQQSWNTPWTFGQGTKLEIKRLEPSEAEISHTQKATLVCLATGFYPDHVELSWWVNGKEVHSGVCTDPQPLKEQPALNDSRYCLSSRLRVSATFWQNPRNHFRCQVQFYGLSENDEWTQDRAKPVTQIVSAEAWGRADCGFTSESYQQGVLSATILYEILLGKATLYAVLVSALVLMAMVKRKDSRGRAKRSGSGATNFSLLKQAGDVEENPGPTSMDWIWRILFLVGAATGAHSFEQVQLQQPGAELVKPGASVKMSCKASGYAFSSYWINWMKQKPGQGLEWIGQIYPGDGDTNYNGKFKGRATLTADTSSSTAYMQLSSLTSEDSAVYFCARSITTVVGCAMDYWGQGTSVTVSSTRIQNPDPAVYQLRDSKSSDKSVCLFTDFDSQTNVSQSKDSDVYITDKCVLDMRSMDFKSNSAVAWSNKSDFACANAFNNSIIPEDTFFPSPESSCDVKLVEKSFETDTNLNFQNLSVIGFRILLLKVAGFNLLMTLRLWSSRAKRSGSGVKQTLNFDLLKLAGDVESNPGPSRAHMTEYKPTVRLATRDDVPRAVRTLAAAFADYPATRHTVDPDRHIERVTELQELFLTRVGLDIGKVWVADDGAAVAVWTTPESVEAGAVFAEIGPRMAELSGSRLAAQQQMEGLLAPHRPKEPAWFLATVGVSPDHQGKGLGSAVVLPGVEAAERAGVPAFLETSAPRNLPFYERLGFTVTADVEVPEGPRTWCMTRKPGA

SEQ ID NO: 22634 - protein, 838 aa, Artificial Sequence
  Synthetic Polypeptide
MALPVTALLLPLALLLHAARPDIQMTQSPSSLSASVGDRVTITCKASDHINNWLAWYQQKPGQAPKLLIYGATTLETGVPSRFSGSGSGTDYTLTISSLQPEDFATYYCQQSWNTPWTFGQGTKLEIKRLEDLKNVFPPEVAVFEPSEAEISHTQKATLVCLATGFYPDHVELSWWVNGKEVHSGVCTDPQPLKEQPALNDSRYCLSSRLRVSATFWQNPRNHFRCQVQFYGLSENDEWTQDRAKPVTQIVSAEAWGRADCGFTSESYQQGVLSATILYEILLGKATLYAVLVSALVLMAMVKRKDSRGRAKRSGSGATNFSLLKQAGDVEENPGPTSMDWIWRILFLVGAATGAHSFEQVQLQQPGAELVKPGASVKMSCKASGYAFSSYWINWMKQKPGQGLEWIGQIYPGDGDTNYNGKFKGRATLTADTSSSTAYMQLSSLTSEDSAVYFCARSITTVVGCAMDYWGQGTSVTVSSTRDKSVCLFTDFDSQTNVSQSKDSDVYITDKCVLDMRSMDFKSNSAVAWSNKSDFACANAFNNSIIPEDTFFPSPESSCDVKLVEKSFETDTNLNFQNLSVIGFRILLLKVAGFNLLMTLRLWSSRAKRSGSGVKQTLNFDLLKLAGDVESNPGPSRGHMTEYKPTVRLATRDDVPRAVRTLAAAFADYPATRHTVDPDRHIERVTELQELFLTRVGLDIGKVWVADDGAAVAVWTTPESVEAGAVFAEIGPRMAELSGSRLAAQQQMEGLLAPHRPKEPAWFLATVGVSPDHQGKGLGSAVVLPGVEAAERAGVPAFLETSAPRNLPFYERLGFTVTADVEVPEGPRTWCMTRKPGA

SEQ ID NO: 22635 - protein, 849 aa, Artificial Sequence
  Synthetic Polypeptide
MALPVTALLLPLALLLHAARPDIQMTQSPSSLSASVGDRVTITCKASDHINNWLAWYQQKPGQAPKLLIYGATTLETGVPSRFSGSGSGTDYTLTISSLQPEDFATYYCQQSWNTPWTFGQGTKLEIKRLEDLKNVFPPEVAVFEPSEAEISHTQKATLVCLATGFYPDHVELSWWVNGKEVHSGVCTDPQPLKEQPALNDSRYCLSSRLRVSATFWQNPRNHFRCQVQFYGLSENDEWTQDRAKPVTQIVSAEAWGRADCGFTSESYQQGVLSATILYEILLGKATLYAVLVSALVLMAMVKRKDSRGRAKRSGSGATNFSLLKQAGDVEENPGPTSMDWIWRILFLVGAATGAHSFEQVQLQQPGAELVKPGASVKMSCKASGYAFSSYWINWMKQKPGQGLEWIGQIYPGDGDTNYNGKFKGRATLTADTSSSTAYMQLSSLTSEDSAVYFCARSITTVVGCAMDYWGQGTSVTVSSTRAVYQLRDSKSSDKSVCLFTDFDSQTNVSQSKDSDVYITDKCVLDMRSMDFKSNSAVAWSNKSDFACANAFNNSIIPEDTFFPSPESSCDVKLVEKSFETDTNLNFQNLSVIGFRILLLKVAGFNLLMTLRLWSSRAKRSGSGVKQTLNFDLLKLAGDVESNPGPSRGHMTEYKPTVRLATRDDVPRAVRTLAAAFADYPATRHTVDPDRHIERVTELQELFLTRVGLDIGKVWVADDGAAVAVWTTPESVEAGAVFAEIGPRMAELSGSRLAAQQQMEGLLAPHRPKEPAWFLATVGVSPDHQGKGLGSAVVLPGVEAAERAGVPAFLETSAPRNLPFYERLGFTVTADVEVPEGPRTWCMTRKPGA

SEQ ID NO: 22636 - protein, 842 aa, Artificial Sequence
  Synthetic Polypeptide
MALPVTALLLPLALLLHAARPDIQMTQSPSSLSASVGDRVTITCKASDHINNWLAWYQQKPGQAPKLLIYGATTLETGVPSRFSGSGSGTDYTLTISSLQPEDFATYYCQQSWNTPWTFGQGTKLEIKRLEDLKNVFPPEVAVFEPSEAEISHTQKATLVCLATGFYPDHVELSWWVNGKEVHSGVCTDPQPLKEQPALNDSRYCLSSRLRVSATFWQNPRNHFRCQVQFYGLSENDEWTQDRAKPVTQIVSAEAWGRADCGFTSESYQQGVLSATILYEILLGKATLYAVLVSALVLMAMVKRKDSRGRAKRSGSGATNFSLLKQAGDVEENPGPTSMDWIWRILFLVGAATGAHSFEQVQLQQPGAELVKPGASVKMSCKASGYAFSSYWINWMKQKPGQGLEWIGQIYPGDGDTNYNGKFKGRATLTADTSSSTAYMQLSSLTSEDSAVYFCARSITTVVGCAMDYWGQGTSVTVSSTRSKSSDKSVCLFTDFDSQTNVSQSKDSDVYITDKCVLDMRSMDFKSNSAVAWSNKSDFACANAFNNSIIPEDTFFPSPESSCDVKLVEKSFETDTNLNFQNLSVIGFRILLLKVAGFNLLMTLRLWSSRAKRSGSGVKQTLNFDLLKLAGDVESNPGPSRGHMTEYKPTVRLATRDDVPRAVRTLAAAFADYPATRHTVDPDRHIERVTELQELFLTRVGLDIGKVWVADDGAAVAVWTTPESVEAGAVFAEIGPRMAELSGSRLAAQQQMEGLLAPHRPKEPAWFLATVGVSPDHQGKGLGSAVVLPGVEAAERAGVPAFLETSAPRNLPFYERLGFTVTADVEVPEGPRTWCMTRKPGA

SEQ ID NO: 22637 - protein, 836 aa, Artificial Sequence
  Synthetic Polypeptide
MALPVTALLLPLALLLHAARPDIQMTQSPSSLSASVGDRVTITCKASDHINNWLAWYQQKPGQAPKLLIYGATTLETGVPSRFSGSGSGTDYTLTISSLQPEDFATYYCQQSWNTPWTFGQGTKLEIKRLEVAVFEPSEAEISHTQKATLVCLATGFYPDHVELSWWVNGKEVHSGVCTDPQPLKEQPALNDSRYCLSSRLRVSATFWQNPRNHFRCQVQFYGLSENDEWTQDRAKPVTQIVSAEAWGRADCGFTSESYQQGVLSATILYEILLGKATLYAVLVSALVLMAMVKRKDSRGRAKRSGSGATNFSLLKQAGDVEENPGPTSMDWIWRILFLVGAATGAHSFEQVQLQQPGAELVKPGASVKMSCKASGYAFSSYWINWMKQKPGQGLEWIGQIYPGDGDTNYNGKFKGRATLTADTSSSTAYMQLSSLTSEDSAVYFCARSITTVVGCAMDYWGQGTSVTVSSTRLRDSKSSDKSVCLFTDFDSQTNVSQSKDSDVYITDKCVLDMRSMDFKSNSAVAWSNKSDFACANAFNNSIIPEDTFFPSPESSCDVKLVEKSFETDTNLNFQNLSVIGFRILLLKVAGFNLLMTLRLWSSRAKRSGSGVKQTLNFDLLKLAGDVESNPGPSRGHMTEYKPTVRLATRDDVPRAVRTLAAAFADYPATRHTVDPDRHIERVTELQELFLTRVGLDIGKVWVADDGAAVAVWTTPESVEAGAVFAEIGPRMAELSGSRLAAQQQMEGLLAPHRPKEPAWFLATVGVSPDHQGKGLGSAVVLPGVEAAERAGVPAFLETSAPRNLPFYERLGFTVTADVEVPEGPRTWCMTRKPGA

SEQ ID NO: 22638 - protein, 847 aa, Artificial Sequence
  Synthetic Polypeptide
MALPVTALLLPLALLLHAARPDIQMTQSPSSLSASVGDRVTITCKASDHINNWLAWYQQKPGQAPKLLIYGATTLETGVPSRFSGSGSGTDYTLTISSLQPEDFATYYCQQSWNTPWTFGQGTKLEIKRLEKNVFPPEVAVFEPSEAEISHTQKATLVCLATGFYPDHVELSWWVNGKEVHSGVCTDPQPLKEQPALNDSRYCLSSRLRVSATFWQNPRNHFRCQVQFYGLSENDEWTQDRAKPVTQIVSAEAWGRADCGFTSESYQQGVLSATILYEILLGKATLYAVLVSALVLMAMVKRKDSRGRAKRSGSGATNFSLLKQAGDVEENPGPTSMDWIWRILFLVGAATGAHSFEQVQLQQPGAELVKPGASVKMSCKASGYAFSSYWINWMKQKPGQGLEWIGQIYPGDGDTNYNGKFKGRATLTADTSSSTAYMQLSSLTSEDSAVYFCARSITTVVGCAMDYWGQGTSVTVSSTRAVYQLRDSKSSDKSVCLFTDFDSQTNVSQSKDSDVYITDKCVLDMRSMDFKSNSAVAWSNKSDFACANAFNNSIIPEDTFFPSPESSCDVKLVEKSFETDTNLNFQNLSVIGFRILLLKVAGFNLLMTLRLWSSRAKRSGSGVKQTLNFDLLKLAGDVESNPGPSRGHMTEYKPTVRLATRDDVPRAVRTLAAAFADYPATRHTVDPDRHIERVTELQELFLTRVGLDIGKVWVADDGAAVAVWTTPESVEAGAVFAEIGPRMAELSGSRLAAQQQMEGLLAPHRPKEPAWFLATVGVSPDHQGKGLGSAVVLPGVEAAERAGVPAFLETSAPRNLPFYERLGFTVTADVEVPEGPRTWCMTRKPGA

SEQ ID NO: 22639 - protein, 846 aa, Artificial Sequence
  Synthetic Polypeptide
MALPVTALLLPLALLLHAARPDIQMTQSPSSLSASVGDRVTITCKASDHINNWLAWYQQKPGQAPKLLIYGATTLETGVPSRFSGSGSGTDYTLTISSLQPEDFATYYCQQSWNTPWTFGQGTKLEIKRLENVFPPEVAVFEPSEAEISHTQKATLVCLATGFYPDHVELSWWVNGKEVHSGVCTDPQPLKEQPALNDSRYCLSSRLRVSATFWQNPRNHFRCQVQFYGLSENDEWTQDRAKPVTQIVSAEAWGRADCGFTSESYQQGVLSATILYEILLGKATLYAVLVSALVLMAMVKRKDSRGRAKRSGSGATNFSLLKQAGDVEENPGPTSMDWIWRILFLVGAATGAHSFEQVQLQQPGAELVKPGASVKMSCKASGYAFSSYWINWMKQKPGQGLEWIGQIYPGDGDTNYNGKFKGRATLTADTSSSTAYMQLSSLTSEDSAVYFCARSITTVVGCAMDYWGQGTSVTVSSTRAVYQLRDSKSSDKSVCLFTDFDSQTNVSQSKDSDVYITDKCVLDMRSMDFKSNSAVAWSNKSDFACANAFNNSIIPEDTFFPSPESSCDVKLVEKSFETDTNLNFQNLSVIGFRILLLKVAGFNLLMTLRLWSSRAKRSGSGVKQTLNFDLLKLAGDVESNPGPSRGHMTEYKPTVRLATRDDVPRAVRTLAAAFADYPATRHTVDPDRHIERVTELQELFLTRVGLDIGKVWVADDGAAVAVWTTPESVEAGAVFAEIGPRMAELSGSRLAAQQQMEGLLAPHRPKEPAWFLATVGVSPDHQGKGLGSAVVLPGVEAAERAGVPAFLETSAPRNLPFYERLGFTVTADVEVPEGPRTWCMTRKPGA

SEQ ID NO: 22640 - protein, 844 aa, Artificial Sequence
  Synthetic Polypeptide
MALPVTALLLPLALLLHAARPDIQMTQSPSSLSASVGDRVTITCKASDHINNWLAWYQQKPGQAPKLLIYGATTLETGVPSRFSGSGSGTDYTLTISSLQPEDFATYYCQQSWNTPWTFGQGTKLEIKRLEFPPEVAVFEPSEAEISHTQKATLVCLATGFYPDHVELSWWVNGKEVHSGVCTDPQPLKEQPALNDSRYCLSSRLRVSATFWQNPRNHFRCQVQFYGLSENDEWTQDRAKPVTQIVSAEAWGRADCGFTSESYQQGVLSATILYEILLGKATLYAVLVSALVLMAMVKRKDSRGRAKRSGSGATNFSLLKQAGDVEENPGPTSMDWIWRILFLVGAATGAHSFEQVQLQQPGAELVKPGASVKMSCKASGYAFSSYWINWMKQKPGQGLEWIGQIYPGDGDTNYNGKFKGRATLTADTSSSTAYMQLSSLTSEDSAVYFCARSITTVVGCAMDYWGQGTSVTVSSTRAVYQLRDSKSSDKSVCLFTDFDSQTNVSQSKDSDVYITDKCVLDMRSMDFKSNSAVAWSNKSDFACANAFNNSIIPEDTFFPSPESSCDVKLVEKSFETDTNLNFQNLSVIGFRILLLKVAGFNLLMTLRLWSSRAKRSGSGVKQTLNFDLLKLAGDVESNPGPSRGHMTEYKPTVRLATRDDVPRAVRTLAAAFADYPATRHTVDPDRHIERVTELQELFLTRVGLDIGKVWVADDGAAVAVWTTPESVEAGAVFAEIGPRMAELSGSRLAAQQQMEGLLAPHRPKEPAWFLATVGVSPDHQGKGLGSAVVLPGVEAAERAGVPAFLETSAPRNLPFYERLGFTVTADVEVPEGPRTWCMTRKPGA

SEQ ID NO: 22641 - protein, 821 aa, Artificial Sequence
  Synthetic Polypeptide
MALPVTALLLPLALLLHAARPDIQMTQSPSSLSASVGDRVTITCKASDHINNWLAWYQQKPGQAPKLLIYGATTLETGVPSRFSGSGSGTDYTLTISSLQPEDFATYYCQQSWNTPWTFGQGTKLEIKRLEAEISHTQKATLVCLATGFYPDHVELSWWVNGKEVHSGVCTDPQPLKEQPALNDSRYCLSSRLRVSATFWQNPRNHFRCQVQFYGLSENDEWTQDRAKPVTQIVSAEAWGRADCGFTSESYQQGVLSATILYEILLGKATLYAVLVSALVLMAMVKRKDSRGRAKRSGSGATNFSLLKQAGDVEENPGPTSMDWIWRILFLVGAATGAHSFEQVQLQQPGAELVKPGASVKMSCKASGYAFSSYWINWMKQKPGQGLEWIGQIYPGDGDTNYNGKFKGRATLTADTSSSTAYMQLSSLTSEDSAVYFCARSITTVVGCAMDYWGQGTSVTVSSTRDKSVCLFTDFDSQTNVSQSKDSDVYITDKCVLDMRSMDFKSNSAVAWSNKSDFACANAFNNSIIPEDTFFPSPESSCDVKLVEKSFETDTNLNFQNLSVIGFRILLLKVAGFNLLMTLRLWSSRAKRSGSGVKQTLNFDLLKLAGDVESNPGPSRGHMTEYKPTVRLATRDDVPRAVRTLAAAFADYPATRHTVDPDRHIERVTELQELFLTRVGLDIGKVWVADDGAAVAVWTTPESVEAGAVFAEIGPRMAELSGSRLAAQQQMEGLLAPHRPKEPAWFLATVGVSPDHQGKGLGSAVVLPGVEAAERAGVPAFLETSAPRNLPFYERLGFTVTADVEVPEGPRTWCMTRKPGA

SEQ ID NO: 22642 - protein, 812 aa, Artificial Sequence
  Synthetic Polypeptide
MALPVTALLLPLALLLHAARPDIQMTQSPSSLSASVGDRVTITCKASDHINNWLAWYQQKPGQAPKLLIYGATTLETGVPSRFSGSGSGTDYTLTISSLQPEDFATYYCQQSWNTPWTFGQGTKLEIKRLEAEISHTQKATLVCLATGFYPDHVELSWWVNGKEVHSGVCTDPQPLKEQPALNDSRYCLSSRLRVSATFWQNPRNHFRCQVQFYGLSENDEWTQDRAKPVTQIVSAEAWGRADCGFTSESYQQGVLSATILYEILLGKATLYAVLVSALVLMAMVKRKDSRGRAKRSGSGATNFSLLKQAGDVEENPGPTSMDWIWRILFLVGAATGAHSFEQVQLQQPGAELVKPGASVKMSCKASGYAFSSYWINWMKQKPGQGLEWIGQIYPGDGDTNYNGKFKGRATLTADTSSSTAYMQLSSLTSEDSAVYFCARSITTVVGCAMDYWGQGTSVTVSSTRFDSQTNVSQSKDSDVYITDKCVLDMRSMDFKSNSAVAWSNKSDFACANAFNNSIIPEDTFFPSPESSCDVKLVEKSFETDTNLNFQNLSVIGFRILLLKVAGFNLLMTLRLWSSRAKRSGSGVKQTLNFDLLKLAGDVESNPGPSRGHMTEYKPTVRLATRDDVPRAVRTLAAAFADYPATRHTVDPDRHIERVTELQELFLTRVGLDIGKVWVADDGAAVAVWTTPESVEAGAVFAEIGPRMAELSGSRLAAQQQMEGLLAPHRPKEPAWFLATVGVSPDHQGKGLGSAVVLPGVEAAERAGVPAFLETSAPRNLPFYERLGFTVTADVEVPEGPRTWCMTRKPGA

SEQ ID NO: 22643 - protein, 806 aa, Artificial Sequence
  Synthetic Polypeptide
MALPVTALLLPLALLLHAARPDIQMTQSPSSLSASVGDRVTITCKASDHINNWLAWYQQKPGQAPKLLIYGATTLETGVPSRFSGSGSGTDYTLTISSLQPEDFATYYCQQSWNTPWTFGQGTKLEIKRLEAEISHTQKATLVCLATGFYPDHVELSWWVNGKEVHSGVCTDPQPLKEQPALNDSRYCLSSRLRVSATFWQNPRNHFRCQVQFYGLSENDEWTQDRAKPVTQIVSAEAWGRADCGFTSESYQQGVLSATILYEILLGKATLYAVLVSALVLMAMVKRKDSRGRAKRSGSGATNFSLLKQAGDVEENPGPTSMDWIWRILFLVGAATGAHSFEQVQLQQPGAELVKPGASVKMSCKASGYAFSSYWINWMKQKPGQGLEWIGQIYPGDGDTNYNGKFKGRATLTADTSSSTAYMQLSSLTSEDSAVYFCARSITTVVGCAMDYWGQGTSVTVSSTRVSQSKDSDVYITDKCVLDMRSMDFKSNSAVAWSNKSDFACANAFNNSIIPEDTFFPSPESSCDVKLVEKSFETDTNLNFQNLSVIGFRILLLKVAGFNLLMTLRLWSSRAKRSGSGVKQTLNFDLLKLAGDVESNPGPSRGHMTEYKPTVRLATRDDVPRAVRTLAAAFADYPATRHTVDPDRHIERVTELQELFLTRVGLDIGKVWVADDGAAVAVWTTPESVEAGAVFAEIGPRMAELSGSRLAAQQQMEGLLAPHRPKEPAWFLATVGVSPDHQGKGLGSAVVLPGVEAAERAGVPAFLETSAPRNLPFYERLGFTVTADVEVPEGPRTWCMTRKPGA

SEQ ID NO: 22644 - protein, 801 aa, Artificial Sequence
  Synthetic Polypeptide
MALPVTALLLPLALLLHAARPDIQMTQSPSSLSASVGDRVTITCKASDHINNWLAWYQQKPGQAPKLLIYGATTLETGVPSRFSGSGSGTDYTLTISSLQPEDFATYYCQQSWNTPWTFGQGTKLEIKRLEAEISHTQKATLVCLATGFYPDHVELSWWVNGKEVHSGVCTDPQPLKEQPALNDSRYCLSSRLRVSATFWQNPRNHFRCQVQFYGLSENDEWTQDRAKPVTQIVSAEAWGRADCGFTSESYQQGVLSATILYEILLGKATLYAVLVSALVLMAMVKRKDSRGRAKRSGSGATNFSLLKQAGDVEENPGPTSMDWIWRILFLVGAATGAHSFEQVQLQQPGAELVKPGASVKMSCKASGYAFSSYWINWMKQKPGQGLEWIGQIYPGDGDTNYNGKFKGRATLTADTSSSTAYMQLSSLTSEDSAVYFCARSITTVVGCAMDYWGQGTSVTVSSTRDSDVYITDKCVLDMRSMDFKSNSAVAWSNKSDFACANAFNNSIIPEDTFFPSPESSCDVKLVEKSFETDTNLNFQNLSVIGFRILLLKVAGFNLLMTLRLWSSRAKRSGSGVKQTLNFDLLKLAGDVESNPGPSRGHMTEYKPTVRLATRDDVPRAVRTLAAAFADYPATRHTVDPDRHIERVTELQELFLTRVGLDIGKVWVADDGAAVAVWTTPESVEAGAVFAEIGPRMAELSGSRLAAQQQMEGLLAPHRPKEPAWFLATVGVSPDHQGKGLGSAVVLPGVEAAERAGVPAFLETSAPRNLPFYERLGFTVTADVEVPEGPRTWCMTRKPGA

SEQ ID NO: 22645 - protein, 792 aa, Artificial Sequence
  Synthetic Polypeptide
MALPVTALLLPLALLLHAARPDIQMTQSPSSLSASVGDRVTITCKASDHINNWLAWYQQKPGQAPKLLIYGATTLETGVPSRFSGSGSGTDYTLTISSLQPEDFATYYCQQSWNTPWTFGQGTKLEIKRLEAEISHTQKATLVCLATGFYPDHVELSWWVNGKEVHSGVCTDPQPLKEQPALNDSRYCLSSRLRVSATFWQNPRNHFRCQVQFYGLSENDEWTQDRAKPVTQIVSAEAWGRADCGFTSESYQQGVLSATILYEILLGKATLYAVLVSALVLMAMVKRKDSRGRAKRSGSGATNFSLLKQAGDVEENPGPTSMDWIWRILFLVGAATGAHSFEQVQLQQPGAELVKPGASVKMSCKASGYAFSSYWINWMKQKPGQGLEWIGQIYPGDGDTNYNGKFKGRATLTADTSSSTAYMQLSSLTSEDSAVYFCARSITTVVGCAMDYWGQGTSVTVSSTRCVLDMRSMDFKSNSAVAWSNKSDFACANAFNNSIIPEDTFFPSPESSCDVKLVEKSFETDTNLNFQNLSVIGFRILLLKVAGFNLLMTLRLWSSRAKRSGSGVKQTLNFDLLKLAGDVESNPGPSRGHMTEYKPTVRLATRDDVPRAVRTLAAAFADYPATRHTVDPDRHIERVTELQELFLTRVGLDIGKVWVADDGAAVAVWTTPESVEAGAVFAEIGPRMAELSGSRLAAQQQMEGLLAPHRPKEPAWFLATVGVSPDHQGKGLGSAVVLPGVEAAERAGVPAFLETSAPRNLPFYERLGFTVTADVEVPEGPRTWCMTRKPGA

SEQ ID NO: 22646 - protein, 786 aa, Artificial Sequence
  Synthetic Polypeptide
MALPVTALLLPLALLLHAARPDIQMTQSPSSLSASVGDRVTITCKASDHINNWLAWYQQKPGQAPKLLIYGATTLETGVPSRFSGSGSGTDYTLTISSLQPEDFATYYCQQSWNTPWTFGQGTKLEIKRLEAEISHTQKATLVCLATGFYPDHVELSWWVNGKEVHSGVCTDPQPLKEQPALNDSRYCLSSRLRVSATFWQNPRNHFRCQVQFYGLSENDEWTQDRAKPVTQIVSAEAWGRADCGFTSESYQQGVLSATILYEILLGKATLYAVLVSALVLMAMVKRKDSRGRAKRSGSGATNFSLLKQAGDVEENPGPTSMDWIWRILFLVGAATGAHSFEQVQLQQPGAELVKPGASVKMSCKASGYAFSSYWINWMKQKPGQGLEWIGQIYPGDGDTNYNGKFKGRATLTADTSSSTAYMQLSSLTSEDSAVYFCARSITTVVGCAMDYWGQGTSVTVSSTRSMDFKSNSAVAWSNKSDFACANAFNNSIIPEDTFFPSPESSCDVKLVEKSFETDTNLNFQNLSVIGFRILLLKVAGFNLLMTLRLWSSRAKRSGSGVKQTLNFDLLKLAGDVESNPGPSRGHMTEYKPTVRLATRDDVPRAVRTLAAAFADYPATRHTVDPDRHIERVTELQELFLTRVGLDIGKVWVADDGAAVAVWTTPESVEAGAVFAEIGPRMAELSGSRLAAQQQMEGLLAPHRPKEPAWFLATVGVSPDHQGKGLGSAVVLPGVEAAERAGVPAFLETSAPRNLPFYERLGFTVTADVEVPEGPRTWCMTRKPGA

SEQ ID NO: 22647 - protein, 782 aa, Artificial Sequence
  Synthetic Polypeptide
MALPVTALLLPLALLLHAARPDIQMTQSPSSLSASVGDRVTITCKASDHINNWLAWYQQKPGQAPKLLIYGATTLETGVPSRFSGSGSGTDYTLTISSLQPEDFATYYCQQSWNTPWTFGQGTKLEIKRLELSWWVNGKEVHSGVCTDPQPLKEQPALNDSRYCLSSRLRVSATFWQNPRNHFRCQVQFYGLSENDEWTQDRAKPVTQIVSAEAWGRADCGFTSESYQQGVLSATILYEILLGKATLYAVLVSALVLMAMVKRKDSRGRAKRSGSGATNFSLLKQAGDVEENPGPTSMDWIWRILFLVGAATGAHSFEQVQLQQPGAELVKPGASVKMSCKASGYAFSSYWINWMKQKPGQGLEWIGQIYPGDGDTNYNGKFKGRATLTADTSSSTAYMQLSSLTSEDSAVYFCARSITTVVGCAMDYWGQGTSVTVSSTRVSQSKDSDVYITDKCVLDMRSMDFKSNSAVAWSNKSDFACANAFNNSIIPEDTFFPSPESSCDVKLVEKSFETDTNLNFQNLSVIGFRILLLKVAGFNLLMTLRLWSSRAKRSGSGVKQTLNFDLLKLAGDVESNPGPSRGHMTEYKPTVRLATRDDVPRAVRTLAAAFADYPATRHTVDPDRHIERVTELQELFLTRVGLDIGKVWVADDGAAVAVWTTPESVEAGAVFAEIGPRMAELSGSRLAAQQQMEGLLAPHRPKEPAWFLATVGVSPDHQGKGLGSAVVLPGVEAAERAGVPAFLETSAPRNLPFYERLGFTVTADVEVPEGPRTWCMTRKPGA

SEQ ID NO: 22648 - protein, 768 aa, Artificial Sequence
  Synthetic Polypeptide
MALPVTALLLPLALLLHAARPDIQMTQSPSSLSASVGDRVTITCKASDHINNWLAWYQQKPGQAPKLLIYGATTLETGVPSRFSGSGSGTDYTLTISSLQPEDFATYYCQQSWNTPWTFGQGTKLEIKRLEVHSGVCTDPQPLKEQPALNDSRYCLSSRLRVSATFWQNPRNHFRCQVQFYGLSENDEWTQDRAKPVTQIVSAEAWGRADCGFTSESYQQGVLSATILYEILLGKATLYAVLVSALVLMAMVKRKDSRGRAKRSGSGATNFSLLKQAGDVEENPGPTSMDWIWRILFLVGAATGAHSFEQVQLQQPGAELVKPGASVKMSCKASGYAFSSYWINWMKQKPGQGLEWIGQIYPGDGDTNYNGKFKGRATLTADTSSSTAYMQLSSLTSEDSAVYFCARSITTVVGCAMDYWGQGTSVTVSSTRDSDVYITDKCVLDMRSMDFKSNSAVAWSNKSDFACANAFNNSIIPEDTFFPSPESSCDVKLVEKSFETDTNLNFQNLSVIGFRILLLKVAGFNLLMTLRLWSSRAKRSGSGVKQTLNFDLLKLAGDVESNPGPSRGHMTEYKPTVRLATRDDVPRAVRTLAAAFADYPATRHTVDPDRHIERVTELQELFLTRVGLDIGKVWVADDGAAVAVWTTPESVEAGAVFAEIGPRMAELSGSRLAAQQQMEGLLAPHRPKEPAWFLATVGVSPDHQGKGLGSAVVLPGVEAAERAGVPAFLETSAPRNLPFYERLGFTVTADVEVPEGPRTWCMTRKPGA

SEQ ID NO: 22649 - protein, 754 aa, Artificial Sequence
  Synthetic Polypeptide
MALPVTALLLPLALLLHAARPDIQMTQSPSSLSASVGDRVTITCKASDHINNWLAWYQQKPGQAPKLLIYGATTLETGVPSRFSGSGSGTDYTLTISSLQPEDFATYYCQQSWNTPWTFGQGTKLEIKRLECTDPQPLKEQPALNDSRYCLSSRLRVSATFWQNPRNHFRCQVQFYGLSENDEWTQDRAKPVTQIVSAEAWGRADCGFTSESYQQGVLSATILYEILLGKATLYAVLVSALVLMAMVKRKDSRGRAKRSGSGATNFSLLKQAGDVEENPGPTSMDWIWRILFLVGAATGAHSFEQVQLQQPGAELVKPGASVKMSCKASGYAFSSYWINWMKQKPGQGLEWIGQIYPGDGDTNYNGKFKGRATLTADTSSSTAYMQLSSLTSEDSAVYFCARSITTVVGCAMDYWGQGTSVTVSSTRCVLDMRSMDFKSNSAVAWSNKSDFACANAFNNSIIPEDTFFPSPESSCDVKLVEKSFETDTNLNFQNLSVIGFRILLLKVAGFNLLMTLRLWSSRAKRSGSGVKQTLNFDLLKLAGDVESNPGPSRGHMTEYKPTVRLATRDDVPRAVRTLAAAFADYPATRHTVDPDRHIERVTELQELFLTRVGLDIGKVWVADDGAAVAVWTTPESVEAGAVFAEIGPRMAELSGSRLAAQQQMEGLLAPHRPKEPAWFLATVGVSPDHQGKGLGSAVVLPGVEAAERAGVPAFLETSAPRNLPFYERLGFTVTADVEVPEGPRTWCMTRKPGA

SEQ ID NO: 22650 - protein, 740 aa, Artificial Sequence
  Synthetic Polypeptide
MALPVTALLLPLALLLHAARPDIQMTQSPSSLSASVGDRVTITCKASDHINNWLAWYQQKPGQAPKLLIYGATTLETGVPSRFSGSGSGTDYTLTISSLQPEDFATYYCQQSWNTPWTFGQGTKLEIKRLEEQPALNDSRYCLSSRLRVSATFWQNPRNHFRCQVQFYGLSENDEWTQDRAKPVTQIVSAEAWGRADCGFTSESYQQGVLSATILYEILLGKATLYAVLVSALVLMAMVKRKDSRGRAKRSGSGATNFSLLKQAGDVEENPGPTSMDWIWRILFLVGAATGAHSFEQVQLQQPGAELVKPGASVKMSCKASGYAFSSYWINWMKQKPGQGLEWIGQIYPGDGDTNYNGKFKGRATLTADTSSSTAYMQLSSLTSEDSAVYFCARSITTVVGCAMDYWGQGTSVTVSSTRSMDFKSNSAVAWSNKSDFACANAFNNSIIPEDTFFPSPESSCDVKLVEKSFETDTNLNFQNLSVIGFRILLLKVAGFNLLMTLRLWSSRAKRSGSGVKQTLNFDLLKLAGDVESNPGPSRGHMTEYKPTVRLATRDDVPRAVRTLAAAFADYPATRHTVDPDRHIERVTELQELFLTRVGLDIGKVWVADDGAAVAVWTTPESVEAGAVFAEIGPRMAELSGSRLAAQQQMEGLLAPHRPKEPAWFLATVGVSPDHQGKGLGSAVVLPGVEAAERAGVPAFLETSAPRNLPFYERLGFTVTADVEVPEGPRTWCMTRKPGA

SEQ ID NO: 22651 - protein, 856 aa, Artificial Sequence
  Synthetic Polypeptide
MALPVTALLLPLALLLHAARPDIQMTQSPSSLSASVGDRVTITCKASDHINNWLAWYQQKPGQAPKLLIYGATTLETGVPSRFSGSGSGTDYTLTISSLQPEDFATYYCQQSWNTPWTFGQGTKLEIKRLEADVSPKPTIFLPSIAETKLQKAGTYLCLLEKFFPDVIKIHWQEKKSNTILGSQEGNTMKTNDTYMKFSWLTVPEKSLDKEHRCIVRHENNKNGVDQEIIFPPIKTDVITMDPKDNCSKDANDTLLLQLTNTSAYYMYLLLLLKSVVYFAIITCCLLRRTAFCCNGEKSRAKRSGSGATNFSLLKQAGDVEENPGPTSMDWIWRILFLVGAATGAHSFEQVQLQQPGAELVKPGASVKMSCKASGYAFSSYWINWMKQKPGQGLEWIGQIYPGDGDTNYNGKFKGRATLTADTSSSTAYMQLSSLTSEDSAVYFCARSITTVVGCAMDYWGQGTSVTVSSTRPHTKPSVFVMKNGTNVACLVKEFYPKDIRINLVSSKKITEFDPAIVISPSGKYNAVKLGKYEDSNSVTCSVQHDNKTVHSTDFEVKTDSTDHVKPKETENTKQPSKSCHKPKAIVHTEKVNMMSLTVLGLRMLFAKTVAVNFLLTAKLFFLRAKRSGSGVKQTLNFDLLKLAGDVESNPGPSRGHMTEYKPTVRLATRDDVPRAVRTLAAAFADYPATRHTVDPDRHIERVTELQELFLTRVGLDIGKVWVADDGAAVAVWTTPESVEAGAVFAEIGPRMAELSGSRLAAQQQMEGLLAPHRPKEPAWFLATVGVSPDHQGKGLGSAVVLPGVEAAERAGVPAFLETSAPRNLPFYERLGFTVTADVEVPEGPRTWCMTRKPGA

SEQ ID NO: 22652 - protein, 854 aa, Artificial Sequence
  Synthetic Polypeptide
MALPVTALLLPLALLLHAARPDIQMTQSPSSLSASVGDRVTITCKASDHINNWLAWYQQKPGQAPKLLIYGATTLETGVPSRFSGSGSGTDYTLTISSLQPEDFATYYCQQSWNTPWTFGQGTKLEIKRLEVSPKPTIFLPSIAETKLQKAGTYLCLLEKFFPDVIKIHWQEKKSNTILGSQEGNTMKTNDTYMKFSWLTVPEKSLDKEHRCIVRHENNKNGVDQEIIFPPIKTDVITMDPKDNCSKDANDTLLLQLTNTSAYYMYLLLLLKSVVYFAIITCCLLRRTAFCCNGEKSRAKRSGSGATNFSLLKQAGDVEENPGPTSMDWIWRILFLVGAATGAHSFEQVQLQQPGAELVKPGASVKMSCKASGYAFSSYWINWMKQKPGQGLEWIGQIYPGDGDTNYNGKFKGRATLTADTSSSTAYMQLSSLTSEDSAVYFCARSITTVVGCAMDYWGQGTSVTVSSTRPHTKPSVFVMKNGTNVACLVKEFYPKDIRINLVSSKKITEFDPAIVISPSGKYNAVKLGKYEDSNSVTCSVQHDNKTVHSTDFEVKTDSTDHVKPKETENTKQPSKSCHKPKAIVHTEKVNMMSLTVLGLRMLFAKTVAVNFLLTAKLFFLRAKRSGSGVKQTLNFDLLKLAGDVESNPGPSRGHMTEYKPTVRLATRDDVPRAVRTLAAAFADYPATRHTVDPDRHIERVTELQELFLTRVGLDIGKVWVADDGAAVAVWTTPESVEAGAVFAEIGPRMAELSGSRLAAQQQMEGLLAPHRPKEPAWFLATVGVSPDHQGKGLGSAVVLPGVEAAERAGVPAFLETSAPRNLPFYERLGFTVTADVEVPEGPRTWCMTRKPGA

SEQ ID NO: 22653 - protein, 849 aa, Artificial Sequence
  Synthetic Polypeptide
MALPVTALLLPLALLLHAARPDIQMTQSPSSLSASVGDRVTITCKASDHINNWLAWYQQKPGQAPKLLIYGATTLETGVPSRFSGSGSGTDYTLTISSLQPEDFATYYCQQSWNTPWTFGQGTKLEIKRLETIFLPSIAETKLQKAGTYLCLLEKFFPDVIKIHWQEKKSNTILGSQEGNTMKTNDTYMKFSWLTVPEKSLDKEHRCIVRHENNKNGVDQEIIFPPIKTDVITMDPKDNCSKDANDTLLLQLTNTSAYYMYLLLLLKSVVYFAIITCCLLRRTAFCCNGEKSRAKRSGSGATNFSLLKQAGDVEENPGPTSMDWIWRILFLVGAATGAHSFEQVQLQQPGAELVKPGASVKMSCKASGYAFSSYWINWMKQKPGQGLEWIGQIYPGDGDTNYNGKFKGRATLTADTSSSTAYMQLSSLTSEDSAVYFCARSITTVVGCAMDYWGQGTSVTVSSTRPHTKPSVFVMKNGTNVACLVKEFYPKDIRINLVSSKKITEFDPAIVISPSGKYNAVKLGKYEDSNSVTCSVQHDNKTVHSTDFEVKTDSTDHVKPKETENTKQPSKSCHKPKAIVHTEKVNMMSLTVLGLRMLFAKTVAVNFLLTAKLFFLRAKRSGSGVKQTLNFDLLKLAGDVESNPGPSRGHMTEYKPTVRLATRDDVPRAVRTLAAAFADYPATRHTVDPDRHIERVTELQELFLTRVGLDIGKVWVADDGAAVAVWTTPESVEAGAVFAEIGPRMAELSGSRLAAQQQMEGLLAPHRPKEPAWFLATVGVSPDHQGKGLGSAVVLPGVEAAERAGVPAFLETSAPRNLPFYERLGFTVTADVEVPEGPRTWCMTRKPGA

SEQ ID NO: 22654 - protein, 848 aa, Artificial Sequence
  Synthetic Polypeptide
MALPVTALLLPLALLLHAARPDIQMTQSPSSLSASVGDRVTITCKASDHINNWLAWYQQKPGQAPKLLIYGATTLETGVPSRFSGSGSGTDYTLTISSLQPEDFATYYCQQSWNTPWTFGQGTKLEIKRLEVSPKPTIFLPSIAETKLQKAGTYLCLLEKFFPDVIKIHWQEKKSNTILGSQEGNTMKTNDTYMKFSWLTVPEKSLDKEHRCIVRHENNKNGVDQEIIFPPIKTDVITMDPKDNCSKDANDTLLLQLTNTSAYYMYLLLLLKSVVYFAIITCCLLRRTAFCCNGEKSRAKRSGSGATNFSLLKQAGDVEENPGPTSMDWIWRILFLVGAATGAHSFEQVQLQQPGAELVKPGASVKMSCKASGYAFSSYWINWMKQKPGQGLEWIGQIYPGDGDTNYNGKFKGRATLTADTSSSTAYMQLSSLTSEDSAVYFCARSITTVVGCAMDYWGQGTSVTVSSTRVFVMKNGTNVACLVKEFYPKDIRINLVSSKKITEFDPAIVISPSGKYNAVKLGKYEDSNSVTCSVQHDNKTVHSTDFEVKTDSTDHVKPKETENTKQPSKSCHKPKAIVHTEKVNMMSLTVLGLRMLFAKTVAVNFLLTAKLFFLRAKRSGSGVKQTLNFDLLKLAGDVESNPGPSRGHMTEYKPTVRLATRDDVPRAVRTLAAAFADYPATRHTVDPDRHIERVTELQELFLTRVGLDIGKVWVADDGAAVAVWTTPESVEAGAVFAEIGPRMAELSGSRLAAQQQMEGLLAPHRPKEPAWFLATVGVSPDHQGKGLGSAVVLPGVEAAERAGVPAFLETSAPRNLPFYERLGFTVTADVEVPEGPRTWCMTRKPGA

SEQ ID NO: 22655 - protein, 838 aa, Artificial Sequence
  Synthetic Polypeptide
MALPVTALLLPLALLLHAARPDIQMTQSPSSLSASVGDRVTITCKASDHINNWLAWYQQKPGQAPKLLIYGATTLETGVPSRFSGSGSGTDYTLTISSLQPEDFATYYCQQSWNTPWTFGQGTKLEIKRLETIFLPSIAETKLQKAGTYLCLLEKFFPDVIKIHWQEKKSNTILGSQEGNTMKTNDTYMKFSWLTVPEKSLDKEHRCIVRHENNKNGVDQEIIFPPIKTDVITMDPKDNCSKDANDTLLLQLTNTSAYYMYLLLLLKSVVYFAIITCCLLRRTAFCCNGEKSRAKRSGSGATNFSLLKQAGDVEENPGPTSMDWIWRILFLVGAATGAHSFEQVQLQQPGAELVKPGASVKMSCKASGYAFSSYWINWMKQKPGQGLEWIGQIYPGDGDTNYNGKFKGRATLTADTSSSTAYMQLSSLTSEDSAVYFCARSITTVVGCAMDYWGQGTSVTVSSTRNGTNVACLVKEFYPKDIRINLVSSKKITEFDPAIVISPSGKYNAVKLGKYEDSNSVTCSVQHDNKTVHSTDFEVKTDSTDHVKPKETENTKQPSKSCHKPKAIVHTEKVNMMSLTVLGLRMLFAKTVAVNFLLTAKLFFLRAKRSGSGVKQTLNFDLLKLAGDVESNPGPSRGHMTEYKPTVRLATRDDVPRAVRTLAAAFADYPATRHTVDPDRHIERVTELQELFLTRVGLDIGKVWVADDGAAVAVWTTPESVEAGAVFAEIGPRMAELSGSRLAAQQQMEGLLAPHRPKEPAWFLATVGVSPDHQGKGLGSAVVLPGVEAAERAGVPAFLETSAPRNLPFYERLGFTVTADVEVPEGPRTWCMTRKPGA

SEQ ID NO: 22656 - protein, 9 aa, Artificial Sequence
  Synthetic Polypeptide
GGGGGGGGG

SEQ ID NO: 22657 - protein, 623 aa, Artificial Sequence
  Synthetic Polypeptide
MALPVTALLLPLALLLHAARPSYVLTQPPSVSVAPGQTARITCGGNNIGSKSVHWYQQPPGQAPVVVVYDDSDRPSGIPERFSGSNSGNTATLTISRVEAGDEAVYYCQVWDSSSDHVVFGGGTKLTVLLEDLKNVFPPEVAVFEPSEAEISHTQKATLVCLATGFYPDHVELSWWVNGKEVHSGVCTDPQPLKEQPALNDSRYCLSSRLRVSATFWQNPRNHFRCQVQFYGLSENDEWTQDRAKPVTQIVSAEAWGRADCGFTSESYQQGVLSATILYEILLGKATLYAVLVSALVLMAMVKRKDSRGRAKRSGSGATNFSLLKQAGDVEENPGPTSMDWIWRILFLVGAATGAHSFEQLQLQESGPGLVKPSETLSLTCTVSGGSISSGSYFWGWIRQPPGKGLEWIGSIYYSGITYYNPSLKSRVTISVDTSKNQFSLKLSSVTAADTAVYYCARHDGAVAGLFDYWGQGTLVTVSSATRIQNPDPAVYQLRDSKSSDKSVCLFTDFDSQTNVSQSKDSDVYITDKCVLDMRSMDFKSNSAVAWSNKSDFACANAFNNSIIPEDTFFPSPESSCDVKLVEKSFETDTNLNFQNLSVIGFRILLLKVAGFNLLMTLRLWSS

SEQ ID NO: 22658 - protein, 623 aa, Artificial Sequence; identical to SEQ ID NO: 18866
  Synthetic Polypeptide

SEQ ID NO: 22659 - protein, 623 aa, Artificial Sequence
  Synthetic Polypeptide
MALPVTALLLPLALLLHAARPSYVLTQPPSVSVAPGQTARITCGGKNIGSKSVHWYQQPPGQAPVVVVYDDSDRPSGIPERFSGSNSGNTATLTISRVEAGDEAVYYCQVWDSSSDHVVFGGGTKLTVLLEDLKNVFPPEVAVFEPSEAEISHTQKATLVCLATGFYPDHVELSWWVNGKEVHSGVCTDPQPLKEQPALNDSRYCLSSRLRVSATFWQNPRNHFRCQVQFYGLSENDEWTQDRAKPVTQIVSAEAWGRADCGFTSESYQQGVLSATILYEILLGKATLYAVLVSALVLMAMVKRKDSRGRAKRSGSGATNFSLLKQAGDVEENPGPTSMDWIWRILFLVGAATGAHSFEQLQLQESGPGLVKPSETLSLTCTVSGGSISSGSYFWGWIRQPPGKGLEWIGSIYYSGSTYYNPSLKSRVTISVDTSKNQFSLKLSSVTAADTAVYYCARHDGAVAGLFDYWGQGTLVTVSSATRIQNPDPAVYQLRDSKSSDKSVCLFTDFDSQTNVSQSKDSDVYITDKCVLDMRSMDFKSNSAVAWSNKSDFACANAFNNSIIPEDTFFPSPESSCDVKLVEKSFETDTNLNFQNLSVIGFRILLLKVAGFNLLMTLRLWSS

SEQ ID NO: 22660 - protein, 623 aa, Artificial Sequence
  Synthetic Polypeptide
MALPVTALLLPLALLLHAARPSYVLTQPPSVSVAPGQTARITCGGKNIGSKSVHWYQQPPGQAPVVVVYDDSDRPSGIPERFSGSNSGNTATLTISRVEAGDEAVYYCQVWDSSSDHVVFGGGTKLTVLLEDLKNVFPPEVAVFEPSEAEISHTQKATLVCLATGFYPDHVELSWWVNGKEVHSGVCTDPQPLKEQPALNDSRYCLSSRLRVSATFWQNPRNHFRCQVQFYGLSENDEWTQDRAKPVTQIVSAEAWGRADCGFTSESYQQGVLSATILYEILLGKATLYAVLVSALVLMAMVKRKDSRGRAKRSGSGATNFSLLKQAGDVEENPGPTSMDWIWRILFLVGAATGAHSFEQLQLQESGPGLVKPSETLSLTCTVSGGSISSGSYFWGWIRQPPGKGLEWIGSIYYSGITYYNPTLKSRVTISVDTSKNQFSLKLSSVTAADTAVYYCARHDGAVAGLFDYWGQGTLVTVSSATRIQNPDPAVYQLRDSKSSDKSVCLFTDFDSQTNVSQSKDSDVYITDKCVLDMRSMDFKSNSAVAWSNKSDFACANAFNNSIIPEDTFFPSPESSCDVKLVEKSFETDTNLNFQNLSVIGFRILLLKVAGFNLLMTLRLWSS

SEQ ID NO: 22661 - protein, 623 aa, Artificial Sequence; identical to SEQ ID NO: 18590
  Synthetic Polypeptide

SEQ ID NO: 22662 - protein, 623 aa, Artificial Sequence
  Synthetic Polypeptide
MALPVTALLLPLALLLHAARPSYVLTQPPSVSVAPGQTARITCGGNNIGGKSVHWYQQPPGQAPVVVVYDDSDRPSGIPERFSGSNSGNTATLTISRVEAGDEAVYYCQVWDSSSDHVVFGGGTKLTVLLEDLKNVFPPEVAVFEPSEAEISHTQKATLVCLATGFYPDHVELSWWVNGKEVHSGVCTDPQPLKEQPALNDSRYCLSSRLRVSATFWQNPRNHFRCQVQFYGLSENDEWTQDRAKPVTQIVSAEAWGRADCGFTSESYQQGVLSATILYEILLGKATLYAVLVSALVLMAMVKRKDSRGRAKRSGSGATNFSLLKQAGDVEENPGPTSMDWIWRILFLVGAATGAHSFEQLQLQESGPGLVKPSETLSLTCTVSGGSISSGSYFWGWIRQPPGKGLEWIGSIYYSGSTYYNPSLKSRVTISVDTSKNQFSLKLSSVTAADTAVYYCARHDGAVAGLFDYWGQGTLVTVSSATRIQNPDPAVYQLRDSKSSDKSVCLFTDFDSQTNVSQSKDSDVYITDKCVLDMRSMDFKSNSAVAWSNKSDFACANAFNNSIIPEDTFFPSPESSCDVKLVEKSFETDTNLNFQNLSVIGFRILLLKVAGFNLLMTLRLWSS

SEQ ID NO: 22663 - protein, 623 aa, Artificial Sequence
  Synthetic Polypeptide
MALPVTALLLPLALLLHAARPSYVLTQPPSVSVAPGQTARITCGGNNIGGKSVHWYQQPPGQAPVVVVYDDSDRPSGIPERFSGSNSGNTATLTISRVEAGDEAVYYCQVWDSSSDHVVFGGGTKLTVLLEDLKNVFPPEVAVFEPSEAEISHTQKATLVCLATGFYPDHVELSWWVNGKEVHSGVCTDPQPLKEQPALNDSRYCLSSRLRVSATFWQNPRNHFRCQVQFYGLSENDEWTQDRAKPVTQIVSAEAWGRADCGFTSESYQQGVLSATILYEILLGKATLYAVLVSALVLMAMVKRKDSRGRAKRSGSGATNFSLLKQAGDVEENPGPTSMDWIWRILFLVGAATGAHSFEQLQLQESGPGLVKPSETLSLTCTVSGGSISSGSYFWGWIRQPPGKGLEWIGSIYYSGITYYNPTLKSRVTISVDTSKNQFSLKLSSVTAADTAVYYCARHDGAVAGLFDYWGQGTLVTVSSATRIQNPDPAVYQLRDSKSSDKSVCLFTDFDSQTNVSQSKDSDVYITDKCVLDMRSMDFKSNSAVAWSNKSDFACANAFNNSIIPEDTFFPSPESSCDVKLVEKSFETDTNLNFQNLSVIGFRILLLKVAGFNLLMTLRLWSS

SEQ ID NO: 22664 - protein, 623 aa, Artificial Sequence; identical to SEQ ID NO: 18728
  Synthetic Polypeptide

SEQ ID NO: 22665 - protein, 623 aa, Artificial Sequence; identical to SEQ ID NO: 18935
  Synthetic Polypeptide

SEQ ID NO: 22666 - protein, 623 aa, Artificial Sequence
  Synthetic Polypeptide
MALPVTALLLPLALLLHAARPSYVLTQPPSVSVAPGQTARITCGGNNLGSKSVHWYQQPPGQAPVVVVYDDSDRPSGIPERFSGSNSGNTATLTISRVEAGDEAVYYCQVWDSSSDHVVFGGGTKLTVLLEDLKNVFPPEVAVFEPSEAEISHTQKATLVCLATGFYPDHVELSWWVNGKEVHSGVCTDPQPLKEQPALNDSRYCLSSRLRVSATFWQNPRNHFRCQVQFYGLSENDEWTQDRAKPVTQIVSAEAWGRADCGFTSESYQQGVLSATILYEILLGKATLYAVLVSALVLMAMVKRKDSRGRAKRSGSGATNFSLLKQAGDVEENPGPTSMDWIWRILFLVGAATGAHSFEQLQLQESGPGLVKPSETLSLTCTVSGGSISSGSYFWGWIRQPPGKGLEWIGSIYYSGSTYYNPSLKSRVTISVDTSKNQFSLKLSSVTAADTAVYYCARHDGAVAGLFDYWGQGTLVTVSSATRIQNPDPAVYQLRDSKSSDKSVCLFTDFDSQTNVSQSKDSDVYITDKCVLDMRSMDFKSNSAVAWSNKSDFACANAFNNSIIPEDTFFPSPESSCDVKLVEKSFETDTNLNFQNLSVIGFRILLLKVAGFNLLMTLRLWSS

SEQ ID NO: 22667 - protein, 623 aa, Artificial Sequence
  Synthetic Polypeptide
MALPVTALLLPLALLLHAARPSYVLTQPPSVSVAPGQTARITCGGNNLGSKSVHWYQQPPGQAPVVVVYDDSDRPSGIPERFSGSNSGNTATLTISRVEAGDEAVYYCQVWDSSSDHVVFGGGTKLTVLLEDLKNVFPPEVAVFEPSEAEISHTQKATLVCLATGFYPDHVELSWWVNGKEVHSGVCTDPQPLKEQPALNDSRYCLSSRLRVSATFWQNPRNHFRCQVQFYGLSENDEWTQDRAKPVTQIVSAEAWGRADCGFTSESYQQGVLSATILYEILLGKATLYAVLVSALVLMAMVKRKDSRGRAKRSGSGATNFSLLKQAGDVEENPGPTSMDWIWRILFLVGAATGAHSFEQLQLQESGPGLVKPSETLSLTCTVSGGSISSGSYFWGWIRQPPGKGLEWIGSIYYSGITYYNPTLKSRVTISVDTSKNQFSLKLSSVTAADTAVYYCARHDGAVAGLFDYWGQGTLVTVSSATRIQNPDPAVYQLRDSKSSDKSVCLFTDFDSQTNVSQSKDSDVYITDKCVLDMRSMDFKSNSAVAWSNKSDFACANAFNNSIIPEDTFFPSPESSCDVKLVEKSFETDTNLNFQNLSVIGFRILLLKVAGFNLLMTLRLWSS

SEQ ID NO: 22668 - protein, 623 aa, Artificial Sequence; identical to SEQ ID NO: 19004
  Synthetic Polypeptide

SEQ ID NO: 22669 - protein, 650 aa, Artificial Sequence
  Synthetic Polypeptide
MALPVTALLLPLALLLHAARPSYVLTQPPSVSVAPGQTARITCGGNNIGSKSVHWYQQPPGQAPVVVVYDDSDRPSGIPERFSGSNSGNTATLTISRVEAGDEAVYYCQVWDSSSDHVVFGGGTKLTVLLEGSGGGGSGGGGSGEDLKNVFPPEVAVFEPSEAEISHTQKATLVCLATGFYPDHVELSWWVNGKEVHSGVCTDPQPLKEQPALNDSRYCLSSRLRVSATFWQNPRNHFRCQVQFYGLSENDEWTQDRAKPVTQIVSAEAWGRADCGFTSESYQQGVLSATILYEILLGKATLYAVLVSALVLMAMVKRKDSRGRAKRSGSGATNFSLLKQAGDVEENPGPTSMDWIWRILFLVGAATGAHSFEQLQLQESGPGLVKPSETLSLTCTVSGGSISSGSYFWGWIRQPPGKGLEWIGSIYYSGITYYNPGLKSRVTISVDTSKNQFSLKLSSVTAADTAVYYCARHDGAVAGLFDYWGQGTLVTVSSATRGSGGGGSGGGGSGIQNPDPAVYQLRDSKSSDKSVCLFTDFDSQTNVSQSKDSDVYITDKCVLDMRSMDFKSNSAVAWSNKSDFACANAFNNSIIPEDTFFPSPESSCDVKLVEKSFETDTNLNFQNLSVIGFRILLLKVAGFNLLMTLRLWSS

SEQ ID NO: 22670 - protein, 650 aa, Artificial Sequence
  Synthetic Polypeptide
MALPVTALLLPLALLLHAARPSYVLTQPPSVSVAPGQTARITCGGNNIGSKSVHWYQQPPGQAPVVVVYDDSDRPSGIPERFSGSNSGNTATLTISRVEAGDEAVYYCQVWDSSSDHVVFGGGTKLTVLLEGSGGGGSGGGGSGEDLKNVFPPEVAVFEPSEAEISHTQKATLVCLATGFYPDHVELSWWVNGKEVHSGVCTDPQPLKEQPALNDSRYCLSSRLRVSATFWQNPRNHFRCQVQFYGLSENDEWTQDRAKPVTQIVSAEAWGRADCGFTSESYQQGVLSATILYEILLGKATLYAVLVSALVLMAMVKRKDSRGRAKRSGSGATNFSLLKQAGDVEENPGPTSMDWIWRILFLVGAATGAHSFEQLQLQESGPGLVKPSETLSLTCTVSGGSISSGSYFWGWIRQPPGKGLEWIGSIYYSGITYYNPTLKSRVTISVDTSKNQFSLKLSSVTAADTAVYYCARHDGAVAGLFDYWGQGTLVTVSSATRGSGGGGSGGGGSGIQNPDPAVYQLRDSKSSDKSVCLFTDFDSQTNVSQSKDSDVYITDKCVLDMRSMDFKSNSAVAWSNKSDFACANAFNNSIIPEDTFFPSPESSCDVKLVEKSFETDTNLNFQNLSVIGFRILLLKVAGFNLLMTLRLWSS

SEQ ID NO: 22671 - protein, 650 aa, Artificial Sequence
  Synthetic Polypeptide
MALPVTALLLPLALLLHAARPSYVLTQPPSVSVAPGQTARITCGGKNIGSKSVHWYQQPPGQAPVVVVYDDSDRPSGIPERFSGSNSGNTATLTISRVEAGDEAVYYCQVWDSSSDHVVFGGGTKLTVLLEGSGGGGSGGGGSGEDLKNVFPPEVAVFEPSEAEISHTQKATLVCLATGFYPDHVELSWWVNGKEVHSGVCTDPQPLKEQPALNDSRYCLSSRLRVSATFWQNPRNHFRCQVQFYGLSENDEWTQDRAKPVTQIVSAEAWGRADCGFTSESYQQGVLSATILYEILLGKATLYAVLVSALVLMAMVKRKDSRGRAKRSGSGATNFSLLKQAGDVEENPGPTSMDWIWRILFLVGAATGAHSFEQLQLQESGPGLVKPSETLSLTCTVSGGSISSGSYFWGWIRQPPGKGLEWIGSIYYSGITYYNPSLKSRVTISVDTSKNQFSLKLSSVTAADTAVYYCARHDGAVAGLFDYWGQGTLVTVSSATRGSGGGGSGGGGSGIQNPDPAVYQLRDSKSSDKSVCLFTDFDSQTNVSQSKDSDVYITDKCVLDMRSMDFKSNSAVAWSNKSDFACANAFNNSIIPEDTFFPSPESSCDVKLVEKSFETDTNLNFQNLSVIGFRILLLKVAGFNLLMTLRLWSS

SEQ ID NO: 22672 - protein, 650 aa, Artificial Sequence
  Synthetic Polypeptide
MALPVTALLLPLALLLHAARPSYVLTQPPSVSVAPGQTARITCGGNNIGGKSVHWYQQPPGQAPVVVVYDDSDRPSGIPERFSGSNSGNTATLTISRVEAGDEAVYYCQVWDSSSDHVVFGGGTKLTVLLEGSGGGGSGGGGSGEDLKNVFPPEVAVFEPSEAEISHTQKATLVCLATGFYPDHVELSWWVNGKEVHSGVCTDPQPLKEQPALNDSRYCLSSRLRVSATFWQNPRNHFRCQVQFYGLSENDEWTQDRAKPVTQIVSAEAWGRADCGFTSESYQQGVLSATILYEILLGKATLYAVLVSALVLMAMVKRKDSRGRAKRSGSGATNFSLLKQAGDVEENPGPTSMDWIWRILFLVGAATGAHSFEQLQLQESGPGLVKPSETLSLTCTVSGGSISSGSYFWGWIRQPPGKGLEWIGSIYYSGITYYNPSLKSRVTISVDTSKNQFSLKLSSVTAADTAVYYCARHDGAVAGLFDYWGQGTLVTVSSATRGSGGGGSGGGGSGIQNPDPAVYQLRDSKSSDKSVCLFTDFDSQTNVSQSKDSDVYITDKCVLDMRSMDFKSNSAVAWSNKSDFACANAFNNSIIPEDTFFPSPESSCDVKLVEKSFETDTNLNFQNLSVIGFRILLLKVAGFNLLMTLRLWSS

SEQ ID NO: 22673 - protein, 650 aa, Artificial Sequence
  Synthetic Polypeptide
MALPVTALLLPLALLLHAARPSYVLTQPPSVSVAPGQTARITCGGNNIGSKSVHWYQQPPGQAPVVVVYDDSDRPSGIPERFSGSNSGNTATLTISRVEAGDEAVYYCQVWDSSSDHVVFGGGTKLTVLLEGSGGGGSGGGGSGEDLKNVFPPEVAVFEPSEAEISHTQKATLVCLATGFYPDHVELSWWVNGKEVHSGVCTDPQPLKEQPALNDSRYCLSSRLRVSATFWQNPRNHFRCQVQFYGLSENDEWTQDRAKPVTQIVSAEAWGRADCGFTSESYQQGVLSATILYEILLGKATLYAVLVSALVLMAMVKRKDSRGRAKRSGSGATNFSLLKQAGDVEENPGPTSMDWIWRILFLVGAATGAHSFEQLQLQESGPGLVKPSETLSLTCTVSGGSISSSSYFWGWIRQPPGKGLEWIGSIYYSGITYYNPSLKSRVTISVDTSKNQFSLKLSSVTAADTAVYYCARHDGAVAGLFDYWGQGTLVTVSSATRGSGGGGSGGGGSGIQNPDPAVYQLRDSKSSDKSVCLFTDFDSQTNVSQSKDSDVYITDKCVLDMRSMDFKSNSAVAWSNKSDFACANAFNNSIIPEDTFFPSPESSCDVKLVEKSFETDTNLNFQNLSVIGFRILLLKVAGFNLLMTLRLWSS

SEQ ID NO: 22674 - protein, 650 aa, Artificial Sequence
  Synthetic Polypeptide
MALPVTALLLPLALLLHAARPSYVLTQPPSVSVAPGQTARITCGGNNIGSKSVHWYQQPPGQAPVVVVYDDSDRPSGIPERFSGSNSGNTATLTISRVEAGDEAVYYCQVWDSSSDHVVFGGGTKLTVLLEGSGGGGSGGGGSGEDLKNVFPPEVAVFEPSEAEISHTQKATLVCLATGFYPDHVELSWWVNGKEVHSGVCTDPQPLKEQPALNDSRYCLSSRLRVSATFWQNPRNHFRCQVQFYGLSENDEWTQDRAKPVTQIVSAEAWGRADCGFTSESYQQGVLSATILYEILLGKATLYAVLVSALVLMAMVKRKDSRGRAKRSGSGATNFSLLKQAGDVEENPGPTSMDWIWRILFLVGAATGAHSFEQLQLQESGPGLVKPSETLSLTCTVSGGSISSGSYIWGWIRQPPGKGLEWIGSIYYSGITYYNPSLKSRVTISVDTSKNQFSLKLSSVTAADTAVYYCARHDGAVAGLFDYWGQGTLVTVSSATRGSGGGGSGGGGSGIQNPDPAVYQLRDSKSSDKSVCLFTDFDSQTNVSQSKDSDVYITDKCVLDMRSMDFKSNSAVAWSNKSDFACANAFNNSIIPEDTFFPSPESSCDVKLVEKSFETDTNLNFQNLSVIGFRILLLKVAGFNLLMTLRLWSS

SEQ ID NO: 22675 - protein, 650 aa, Artificial Sequence
  Synthetic Polypeptide
MALPVTALLLPLALLLHAARPSYVLTQPPSVSVAPGQTARITCGGNNIGSKSVHWYQQPPGQAPVVVVYDDSDRPSGIPERFSGSNSGNTATLTISRVEAGDEAVYYCQVWDSSSDHVVFGGGTKLTVLLEGSGGGGSGGGGSGEDLKNVFPPEVAVFEPSEAEISHTQKATLVCLATGFYPDHVELSWWVNGKEVHSGVCTDPQPLKEQPALNDSRYCLSSRLRVSATFWQNPRNHFRCQVQFYGLSENDEWTQDRAKPVTQIVSAEAWGRADCGFTSESYQQGVLSATILYEILLGKATLYAVLVSALVLMAMVKRKDSRGRAKRSGSGATNFSLLKQAGDVEENPGPTSMDWIWRILFLVGAATGAHSFEQLQLQESGPGLVKPSETLSLTCTVSGGSISSGSYFWGWIRQPPGKGLEWIGSIYYSGISYYNPSLKSRVTISVDTSKNQFSLKLSSVTAADTAVYYCARHDGAVAGLFDYWGQGTLVTVSSATRGSGGGGSGGGGSGIQNPDPAVYQLRDSKSSDKSVCLFTDFDSQTNVSQSKDSDVYITDKCVLDMRSMDFKSNSAVAWSNKSDFACANAFNNSIIPEDTFFPSPESSCDVKLVEKSFETDTNLNFQNLSVIGFRILLLKVAGFNLLMTLRLWSS

SEQ ID NO: 22676 - protein, 856 aa, Artificial Sequence
  Synthetic Polypeptide
MALPVTALLLPLALLLHAARPSYVLTQPPSVSVAPGQTARITCGGNNLGSKSVHWYQQPPGQAPVVVVYDDSDRPSGIPERFSGSNSGNTATLTISRVEAGDEAVYYCQVWDSSSDHVVFGGGTKLTVLLEDLKNVFPPEVAVFEPSEAEISHTQKATLVCLATGFYPDHVELSWWVNGKEVHSGVCTDPQPLKEQPALNDSRYCLSSRLRVSATFWQNPRNHFRCQVQFYGLSENDEWTQDRAKPVTQIVSAEAWGRADCGFTSESYQQGVLSATILYEILLGKATLYAVLVSALVLMAMVKRKDSRGRAKRSGSGATNFSLLKQAGDVEENPGPTSMDWIWRILFLVGAATGAHSFEQLQLQESGPGLVKPSETLSLTCTVSGGSISSSSYFWGWIRQPPGKGLEWIGSIYYSGITYYNPSLKSRVTISVDTSKNQFSLKLSSVTAADTAVYYCARHDGAVAGLFDYWGQGTLVTVSSATRIQNPDPAVYQLRDSKSSDKSVCLFTDFDSQTNVSQSKDSDVYITDKCVLDMRSMDFKSNSAVAWSNKSDFACANAFNNSIIPEDTFFPSPESSCDVKLVEKSFETDTNLNFQNLSVIGFRILLLKVAGFNLLMTLRLWSSRAKRSGSGVKQTLNFDLLKLAGDVESNPGPSRGHMTEYKPTVRLATRDDVPRAVRTLAAAFADYPATRHTVDPDRHIERVTELQELFLTRVGLDIGKVWVADDGAAVAVWTTPESVEAGAVFAEIGPRMAELSGSRLAAQQQMEGLLAPHRPKEPAWFLATVGVSPDHQGKGLGSAVVLPGVEAAERAGVPAFLETSAPRNLPFYERLGFTVTADVEVPEGPRTWCMTRKPGA

SEQ ID NO: 22677 - protein, 856 aa, Artificial Sequence
  Synthetic Polypeptide
MALPVTALLLPLALLLHAARPSYVLTQPPSVSVAPGQTARITCGGNNIGGKSVHWYQQPPGQAPVVVVYDDSDRPSGIPERFSGSNSGNTATLTISRVEAGDEAVYYCQVWDSSSDHVVFGGGTKLTVLLEDLKNVFPPEVAVFEPSEAEISHTQKATLVCLATGFYPDHVELSWWVNGKEVHSGVCTDPQPLKEQPALNDSRYCLSSRLRVSATFWQNPRNHFRCQVQFYGLSENDEWTQDRAKPVTQIVSAEAWGRADCGFTSESYQQGVLSATILYEILLGKATLYAVLVSALVLMAMVKRKDSRGRAKRSGSGATNFSLLKQAGDVEENPGPTSMDWIWRILFLVGAATGAHSFEQLQLQESGPGLVKPSETLSLTCTVSGGSISSSSYFWGWIRQPPGKGLEWIGSIYYSGITYYNPSLKSRVTISVDTSKNQFSLKLSSVTAADTAVYYCARHDGAVAGLFDYWGQGTLVTVSSATRIQNPDPAVYQLRDSKSSDKSVCLFTDFDSQTNVSQSKDSDVYITDKCVLDMRSMDFKSNSAVAWSNKSDFACANAFNNSIIPEDTFFPSPESSCDVKLVEKSFETDTNLNFQNLSVIGFRILLLKVAGFNLLMTLRLWSSRAKRSGSGVKQTLNFDLLKLAGDVESNPGPSRGHMTEYKPTVRLATRDDVPRAVRTLAAAFADYPATRHTVDPDRHIERVTELQELFLTRVGLDIGKVWVADDGAAVAVWTTPESVEAGAVFAEIGPRMAELSGSRLAAQQQMEGLLAPHRPKEPAWFLATVGVSPDHQGKGLGSAVVLPGVEAAERAGVPAFLETSAPRNLPFYERLGFTVTADVEVPEGPRTWCMTRKPGA

SEQ ID NO: 22678 - protein, 856 aa, Artificial Sequence
  Synthetic Polypeptide
MALPVTALLLPLALLLHAARPSYVLTQPPSVSVAPGQTARITCGGKNIGSKSVHWYQQPPGQAPVVVVYDDSDRPSGIPERFSGSNSGNTATLTISRVEAGDEAVYYCQVWDSSSDHVVFGGGTKLTVLLEDLKNVFPPEVAVFEPSEAEISHTQKATLVCLATGFYPDHVELSWWVNGKEVHSGVCTDPQPLKEQPALNDSRYCLSSRLRVSATFWQNPRNHFRCQVQFYGLSENDEWTQDRAKPVTQIVSAEAWGRADCGFTSESYQQGVLSATILYEILLGKATLYAVLVSALVLMAMVKRKDSRGRAKRSGSGATNFSLLKQAGDVEENPGPTSMDWIWRILFLVGAATGAHSFEQLQLQESGPGLVKPSETLSLTCTVSGGSISSGSYFWGWIRQPPGKGLEWIGSIYYSGITYYNPSLKSRVTISVDTSKNQFSLKLSSVTAADTAVYYCARHDGAVAGLFDYWGQGTLVTVSSATRIQNPDPAVYQLRDSKSSDKSVCLFTDFDSQTNVSQSKDSDVYITDKCVLDMRSMDFKSNSAVAWSNKSDFACANAFNNSIIPEDTFFPSPESSCDVKLVEKSFETDTNLNFQNLSVIGFRILLLKVAGFNLLMTLRLWSSRAKRSGSGVKQTLNFDLLKLAGDVESNPGPSRGHMTEYKPTVRLATRDDVPRAVRTLAAAFADYPATRHTVDPDRHIERVTELQELFLTRVGLDIGKVWVADDGAAVAVWTTPESVEAGAVFAEIGPRMAELSGSRLAAQQQMEGLLAPHRPKEPAWFLATVGVSPDHQGKGLGSAVVLPGVEAAERAGVPAFLETSAPRNLPFYERLGFTVTADVEVPEGPRTWCMTRKPGA

SEQ ID NO: 22679 - protein, 856 aa, Artificial Sequence
  Synthetic Polypeptide
MALPVTALLLPLALLLHAARPSYVLTQPPSVSVAPGQTARITCGGNNIGGKSVHWYQQPPGQAPVVVVYDDSDRPSGIPERFSGSNSGNTATLTISRVEAGDEAVYYCQVWDSSSDHVVFGGGTKLTVLLEDLKNVFPPEVAVFEPSEAEISHTQKATLVCLATGFYPDHVELSWWVNGKEVHSGVCTDPQPLKEQPALNDSRYCLSSRLRVSATFWQNPRNHFRCQVQFYGLSENDEWTQDRAKPVTQIVSAEAWGRADCGFTSESYQQGVLSATILYEILLGKATLYAVLVSALVLMAMVKRKDSRGRAKRSGSGATNFSLLKQAGDVEENPGPTSMDWIWRILFLVGAATGAHSFEQLQLQESGPGLVKPSETLSLTCTVSGGSISSGSYFWGWIRQPPGKGLEWIGSIYYSGITYYNPSLKSRVTISVDTSKNQFSLKLSSVTAADTAVYYCARHDGAVAGLFDYWGQGTLVTVSSATRIQNPDPAVYQLRDSKSSDKSVCLFTDFDSQTNVSQSKDSDVYITDKCVLDMRSMDFKSNSAVAWSNKSDFACANAFNNSIIPEDTFFPSPESSCDVKLVEKSFETDTNLNFQNLSVIGFRILLLKVAGFNLLMTLRLWSSRAKRSGSGVKQTLNFDLLKLAGDVESNPGPSRGHMTEYKPTVRLATRDDVPRAVRTLAAAFADYPATRHTVDPDRHIERVTELQELFLTRVGLDIGKVWVADDGAAVAVWTTPESVEAGAVFAEIGPRMAELSGSRLAAQQQMEGLLAPHRPKEPAWFLATVGVSPDHQGKGLGSAVVLPGVEAAERAGVPAFLETSAPRNLPFYERLGFTVTADVEVPEGPRTWCMTRKPGA

SEQ ID NO: 22680 - protein, 856 aa, Artificial Sequence
  Synthetic Polypeptide
MALPVTALLLPLALLLHAARPSYVLTQPPSVSVAPGQTARITCGGNNLGSKSVHWYQQPPGQAPVVVVYDDSDRPSGIPERFSGSNSGNTATLTISRVEAGDEAVYYCQVWDSSSDHVVFGGGTKLTVLLEDLKNVFPPEVAVFEPSEAEISHTQKATLVCLATGFYPDHVELSWWVNGKEVHSGVCTDPQPLKEQPALNDSRYCLSSRLRVSATFWQNPRNHFRCQVQFYGLSENDEWTQDRAKPVTQIVSAEAWGRADCGFTSESYQQGVLSATILYEILLGKATLYAVLVSALVLMAMVKRKDSRGRAKRSGSGATNFSLLKQAGDVEENPGPTSMDWIWRILFLVGAATGAHSFEQLQLQESGPGLVKPSETLSLTCTVSGGSISSGSYFWGWIRQPPGKGLEWIGSIYYSGITYYNPSLKSRVTISVDTSKNQFSLKLSSVTAADTAVYYCARHDGAVAGLFDYWGQGTLVTVSSATRIQNPDPAVYQLRDSKSSDKSVCLFTDFDSQTNVSQSKDSDVYITDKCVLDMRSMDFKSNSAVAWSNKSDFACANAFNNSIIPEDTFFPSPESSCDVKLVEKSFETDTNLNFQNLSVIGFRILLLKVAGFNLLMTLRLWSSRAKRSGSGVKQTLNFDLLKLAGDVESNPGPSRGHMTEYKPTVRLATRDDVPRAVRTLAAAFADYPATRHTVDPDRHIERVTELQELFLTRVGLDIGKVWVADDGAAVAVWTTPESVEAGAVFAEIGPRMAELSGSRLAAQQQMEGLLAPHRPKEPAWFLATVGVSPDHQGKGLGSAVVLPGVEAAERAGVPAFLETSAPRNLPFYERLGFTVTADVEVPEGPRTWCMTRKPGA

SEQ ID NO: 22681 - protein, 856 aa, Artificial Sequence
  Synthetic Polypeptide
MALPVTALLLPLALLLHAARPSYVLTQPPSVSVAPGQTARITCGGNNIGSKSVHWYQQPPGQAPVVVVYDDSDRPSGIPERFSGSNSGNTATLTISRVEAGDEAVYYCQVWDSSSDHVVFGGGTKLTVLLEDLKNVFPPEVAVFEPSEAEISHTQKATLVCLATGFYPDHVELSWWVNGKEVHSGVCTDPQPLKEQPALNDSRYCLSSRLRVSATFWQNPRNHFRCQVQFYGLSENDEWTQDRAKPVTQIVSAEAWGRADCGFTSESYQQGVLSATILYEILLGKATLYAVLVSALVLMAMVKRKDSRGRAKRSGSGATNFSLLKQAGDVEENPGPTSMDWIWRILFLVGAATGAHSFEQLQLQESGPGLVKPSETLSLTCTVSGGSISSSSYFWGWIRQPPGKGLEWIGSIYYSGITYYNPSLKSRVTISVDTSKNQFSLKLSSVTAADTAVYYCARHDGAVAGLFDYWGQGTLVTVSSATRIQNPDPAVYQLRDSKSSDKSVCLFTDFDSQTNVSQSKDSDVYITDKCVLDMRSMDFKSNSAVAWSNKSDFACANAFNNSIIPEDTFFPSPESSCDVKLVEKSFETDTNLNFQNLSVIGFRILLLKVAGFNLLMTLRLWSSRAKRSGSGVKQTLNFDLLKLAGDVESNPGPSRGHMTEYKPTVRLATRDDVPRAVRTLAAAFADYPATRHTVDPDRHIERVTELQELFLTRVGLDIGKVWVADDGAAVAVWTTPESVEAGAVFAEIGPRMAELSGSRLAAQQQMEGLLAPHRPKEPAWFLATVGVSPDHQGKGLGSAVVLPGVEAAERAGVPAFLETSAPRNLPFYERLGFTVTADVEVPEGPRTWCMTRKPGA

SEQ ID NO: 22682 - protein, 856 aa, Artificial Sequence
  Synthetic Polypeptide
MALPVTALLLPLALLLHAARPSYVLTQPPSVSVAPGQTARITCGGNNIGSKSVHWYQQPPGQAPVVVVYDDSDRPSGIPERFSGSNSGNTATLTISRVEAGDEAVYYCQVWDSSSDHVVFGGGTKLTVLLEDLKNVFPPEVAVFEPSEAEISHTQKATLVCLATGFYPDHVELSWWVNGKEVHSGVCTDPQPLKEQPALNDSRYCLSSRLRVSATFWQNPRNHFRCQVQFYGLSENDEWTQDRAKPVTQIVSAEAWGRADCGFTSESYQQGVLSATILYEILLGKATLYAVLVSALVLMAMVKRKDSRGRAKRSGSGATNFSLLKQAGDVEENPGPTSMDWIWRILFLVGAATGAHSFEQLQLQESGPGLVKPSETLSLTCTVSGGSISSGSYIWGWIRQPPGKGLEWIGSIYYSGITYYNPSLKSRVTISVDTSKNQFSLKLSSVTAADTAVYYCARHDGAVAGLFDYWGQGTLVTVSSATRIQNPDPAVYQLRDSKSSDKSVCLFTDFDSQTNVSQSKDSDVYITDKCVLDMRSMDFKSNSAVAWSNKSDFACANAFNNSIIPEDTFFPSPESSCDVKLVEKSFETDTNLNFQNLSVIGFRILLLKVAGFNLLMTLRLWSSRAKRSGSGVKQTLNFDLLKLAGDVESNPGPSRGHMTEYKPTVRLATRDDVPRAVRTLAAAFADYPATRHTVDPDRHIERVTELQELFLTRVGLDIGKVWVADDGAAVAVWTTPESVEAGAVFAEIGPRMAELSGSRLAAQQQMEGLLAPHRPKEPAWFLATVGVSPDHQGKGLGSAVVLPGVEAAERAGVPAFLETSAPRNLPFYERLGFTVTADVEVPEGPRTWCMTRKPGA

SEQ ID NO: 22683 - protein, 856 aa, Artificial Sequence
  Synthetic Polypeptide
MALPVTALLLPLALLLHAARPSYVLTQPPSVSVAPGQTARITCGGNNIGSKSVHWYQQPPGQAPVVVVYDDSDRPSGIPERFSGSNSGNTATLTISRVEAGDEAVYYCQVWDSSSDHVVFGGGTKLTVLLEDLKNVFPPEVAVFEPSEAEISHTQKATLVCLATGFYPDHVELSWWVNGKEVHSGVCTDPQPLKEQPALNDSRYCLSSRLRVSATFWQNPRNHFRCQVQFYGLSENDEWTQDRAKPVTQIVSAEAWGRADCGFTSESYQQGVLSATILYEILLGKATLYAVLVSALVLMAMVKRKDSRGRAKRSGSGATNFSLLKQAGDVEENPGPTSMDWIWRILFLVGAATGAHSFEQLQLQESGPGLVKPSETLSLTCTVSGGSISSGSYFWGWIRQPPGKGLEWIGSIYYSGSTYYNPSLKSRVTISVDTSKNQFSLKLSSVTAADTAVYYCARHDGAVAGLFDYWGQGTLVTVSSATRIQNPDPAVYQLRDSKSSDKSVCLFTDFDSQTNVSQSKDSDVYITDKCVLDMRSMDFKSNSAVAWSNKSDFACANAFNNSIIPEDTFFPSPESSCDVKLVEKSFETDTNLNFQNLSVIGFRILLLKVAGFNLLMTLRLWSSRAKRSGSGVKQTLNFDLLKLAGDVESNPGPSRGHMTEYKPTVRLATRDDVPRAVRTLAAAFADYPATRHTVDPDRHIERVTELQELFLTRVGLDIGKVWVADDGAAVAVWTTPESVEAGAVFAEIGPRMAELSGSRLAAQQQMEGLLAPHRPKEPAWFLATVGVSPDHQGKGLGSAVVLPGVEAAERAGVPAFLETSAPRNLPFYERLGFTVTADVEVPEGPRTWCMTRKPGA

SEQ ID NO: 22684 - protein, 856 aa, Artificial Sequence
  Synthetic Polypeptide
MALPVTALLLPLALLLHAARPSYVLTQPPSVSVAPGQTARITCGGNNIGSKSVHWYQQPPGQAPVVVVYDDSDRPSGIPERFSGSNSGNTATLTISRVEAGDEAVYYCQVWDSSSDHVVFGGGTKLTVLLEDLKNVFPPEVAVFEPSEAEISHTQKATLVCLATGFYPDHVELSWWVNGKEVHSGVCTDPQPLKEQPALNDSRYCLSSRLRVSATFWQNPRNHFRCQVQFYGLSENDEWTQDRAKPVTQIVSAEAWGRADCGFTSESYQQGVLSATILYEILLGKATLYAVLVSALVLMAMVKRKDSRGRAKRSGSGATNFSLLKQAGDVEENPGPTSMDWIWRILFLVGAATGAHSFEQLQLQESGPGLVKPSETLSLTCTVSGGSISSGSYFWGWIRQPPGKGLEWIGSIYYSGISYYNPSLKSRVTISVDTSKNQFSLKLSSVTAADTAVYYCARHDGAVAGLFDYWGQGTLVTVSSATRIQNPDPAVYQLRDSKSSDKSVCLFTDFDSQTNVSQSKDSDVYITDKCVLDMRSMDFKSNSAVAWSNKSDFACANAFNNSIIPEDTFFPSPESSCDVKLVEKSFETDTNLNFQNLSVIGFRILLLKVAGFNLLMTLRLWSSRAKRSGSGVKQTLNFDLLKLAGDVESNPGPSRGHMTEYKPTVRLATRDDVPRAVRTLAAAFADYPATRHTVDPDRHIERVTELQELFLTRVGLDIGKVWVADDGAAVAVWTTPESVEAGAVFAEIGPRMAELSGSRLAAQQQMEGLLAPHRPKEPAWFLATVGVSPDHQGKGLGSAVVLPGVEAAERAGVPAFLETSAPRNLPFYERLGFTVTADVEVPEGPRTWCMTRKPGA

SEQ ID NO: 22685 - protein, 856 aa, Artificial Sequence
  Synthetic Polypeptide
MALPVTALLLPLALLLHAARPSYVLTQPPSVSVAPGQTARITCGGNNIGSKSVHWYQQPPGQAPVVVVYDDSDRPSGIPERFSGSNSGNTATLTISRVEAGDEAVYYCQVWDSSSDHVVFGGGTKLTVLLEDLKNVFPPEVAVFEPSEAEISHTQKATLVCLATGFYPDHVELSWWVNGKEVHSGVCTDPQPLKEQPALNDSRYCLSSRLRVSATFWQNPRNHFRCQVQFYGLSENDEWTQDRAKPVTQIVSAEAWGRADCGFTSESYQQGVLSATILYEILLGKATLYAVLVSALVLMAMVKRKDSRGRAKRSGSGATNFSLLKQAGDVEENPGPTSMDWIWRILFLVGAATGAHSFEQLQLQESGPGLVKPSETLSLTCTVSGGSISSGSYFWGWIRQPPGKGLEWIGSIYYSGITYYNPTLKSRVTISVDTSKNQFSLKLSSVTAADTAVYYCARHDGAVAGLFDYWGQGTLVTVSSATRIQNPDPAVYQLRDSKSSDKSVCLFTDFDSQTNVSQSKDSDVYITDKCVLDMRSMDFKSNSAVAWSNKSDFACANAFNNSIIPEDTFFPSPESSCDVKLVEKSFETDTNLNFQNLSVIGFRILLLKVAGFNLLMTLRLWSSRAKRSGSGVKQTLNFDLLKLAGDVESNPGPSRGHMTEYKPTVRLATRDDVPRAVRTLAAAFADYPATRHTVDPDRHIERVTELQELFLTRVGLDIGKVWVADDGAAVAVWTTPESVEAGAVFAEIGPRMAELSGSRLAAQQQMEGLLAPHRPKEPAWFLATVGVSPDHQGKGLGSAVVLPGVEAAERAGVPAFLETSAPRNLPFYERLGFTVTADVEVPEGPRTWCMTRKPGA

SEQ ID NO: 22686 - protein, 850 aa, Artificial Sequence
  Synthetic Polypeptide
MALPVTALLLPLALLLHAARPDIQMTQSPSSLSASVGDRVTITCRASQDISNYLNWYQQKPGKAPKLLIYYTSRLHSGVPSRFSGSGSGTDFTLTISSLQPEDFATYYCQQGNTLPYTFGQGTKVEIKRLEDLKNVFPPEVAVFEPSEAEISHTQKATLVCLATGFYPDHVELSWWVNGKEVHSGVCTDPQPLKEQPALNDSRYCLSSRLRVSATFWQNPRNHFRCQVQFYGLSENDEWTQDRAKPVTQIVSAEAWGRADCGFTSESYQQGVLSATILYEILLGKATLYAVLVSALVLMAMVKRKDSRGRAKRSGSGATNFSLLKQAGDVEENPGPTSMDWIWRILFLVGAATGAHSFEVQLVESGGGLVQPGGSLRLSCAASGFTFSDYFMSWVRQAPGKGLEWVATISNGGTYTYYPDSVKGRFTISRDNSKNTLYLQMNSLRAEDTAVYYCARFDGYIFDYWGQGTLVTVSSTRIQNPDPAVYQLRDSKSSDKSVCLFTDFDSQTNVSQSKDSDVYITDKCVLDMRSMDFKSNSAVAWSNKSDFACANAFNNSIIPEDTFFPSPESSCDVKLVEKSFETDTNLNFQNLSVIGFRILLLKVAGFNLLMTLRLWSSRAKRSGSGVKQTLNFDLLKLAGDVESNPGPSRGHMTEYKPTVRLATRDDVPRAVRTLAAAFADYPATRHTVDPDRHIERVTELQELFLTRVGLDIGKVWVADDGAAVAVWTTPESVEAGAVFAEIGPRMAELSGSRLAAQQQMEGLLAPHRPKEPAWFLATVGVSPDHQGKGLGSAVVLPGVEAAERAGVPAFLETSAPRNLPFYERLGFTVTADVEVPEGPRTWCMTRKPGA

SEQ ID NO: 22687 - protein, 850 aa, Artificial Sequence
  Synthetic Polypeptide
MALPVTALLLPLALLLHAARPDIQMTQSPSSLSASVGDRVTITCRASQDISNYLNWYQQKPGKAPKLLIYYTSRLHSGVPSRFSGSGSGTDFTLTISSLQPEDFATYYCQQGNTLPWTFGQGTKVEIKRLEDLKNVFPPEVAVFEPSEAEISHTQKATLVCLATGFYPDHVELSWWVNGKEVHSGVCTDPQPLKEQPALNDSRYCLSSRLRVSATFWQNPRNHFRCQVQFYGLSENDEWTQDRAKPVTQIVSAEAWGRADCGFTSESYQQGVLSATILYEILLGKATLYAVLVSALVLMAMVKRKDSRGRAKRSGSGATNFSLLKQAGDVEENPGPTSMDWIWRILFLVGAATGAHSFEVQLVESGGGLVQPGGSLRLSCAASGYTFSDYFMSWVRQAPGKGLEWVATISNGGTYTYYPDSVKGRFTISRDNSKNTLYLQMNSLRAEDTAVYYCARFDGYIFDYWGQGTLVTVSSTRIQNPDPAVYQLRDSKSSDKSVCLFTDFDSQTNVSQSKDSDVYITDKCVLDMRSMDFKSNSAVAWSNKSDFACANAFNNSIIPEDTFFPSPESSCDVKLVEKSFETDTNLNFQNLSVIGFRILLLKVAGFNLLMTLRLWSSRAKRSGSGVKQTLNFDLLKLAGDVESNPGPSRGHMTEYKPTVRLATRDDVPRAVRTLAAAFADYPATRHTVDPDRHIERVTELQELFLTRVGLDIGKVWVADDGAAVAVWTTPESVEAGAVFAEIGPRMAELSGSRLAAQQQMEGLLAPHRPKEPAWFLATVGVSPDHQGKGLGSAVVLPGVEAAERAGVPAFLETSAPRNLPFYERLGFTVTADVEVPEGPRTWCMTRKPGA

SEQ ID NO: 22688 - protein, 850 aa, Artificial Sequence
  Synthetic Polypeptide
MALPVTALLLPLALLLHAARPDIQMTQSPSSLSASVGDRVTITCRASQDISSYLNWYQQKPGKAPKLLIYYTSRLHSGVPSRFSGSGSGTDFTLTISSLQPEDFATYYCQQGNTLPYTFGQGTKVEIKRLEDLKNVFPPEVAVFEPSEAEISHTQKATLVCLATGFYPDHVELSWWVNGKEVHSGVCTDPQPLKEQPALNDSRYCLSSRLRVSATFWQNPRNHFRCQVQFYGLSENDEWTQDRAKPVTQIVSAEAWGRADCGFTSESYQQGVLSATILYEILLGKATLYAVLVSALVLMAMVKRKDSRGRAKRSGSGATNFSLLKQAGDVEENPGPTSMDWIWRILFLVGAATGAHSFEVQLVESGGGLVQPGGSLRLSCAASGYTFSDYFMSWVRQAPGKGLEWVATISNGGTYTYYPDSVKGRFTISRDNSKNTLYLQMNSLRAEDTAVYYCARFDGYIFDYWGQGTLVTVSSTRIQNPDPAVYQLRDSKSSDKSVCLFTDFDSQTNVSQSKDSDVYITDKCVLDMRSMDFKSNSAVAWSNKSDFACANAFNNSIIPEDTFFPSPESSCDVKLVEKSFETDTNLNFQNLSVIGFRILLLKVAGFNLLMTLRLWSSRAKRSGSGVKQTLNFDLLKLAGDVESNPGPSRGHMTEYKPTVRLATRDDVPRAVRTLAAAFADYPATRHTVDPDRHIERVTELQELFLTRVGLDIGKVWVADDGAAVAVWTTPESVEAGAVFAEIGPRMAELSGSRLAAQQQMEGLLAPHRPKEPAWFLATVGVSPDHQGKGLGSAVVLPGVEAAERAGVPAFLETSAPRNLPFYERLGFTVTADVEVPEGPRTWCMTRKPGA

SEQ ID NO: 22689 - protein, 850 aa, Artificial Sequence
  Synthetic Polypeptide
MALPVTALLLPLALLLHAARPDIQMTQSPSSLSASVGDRVTITCRASQDISNYLNWYQQKPGKAPKLLIYYTSRLHSGVPSRFSGSGSGTDFTLTISSLQPEDFATYYCQQGNTLPYTFGQGTKVEIKRLEDLKNVFPPEVAVFEPSEAEISHTQKATLVCLATGFYPDHVELSWWVNGKEVHSGVCTDPQPLKEQPALNDSRYCLSSRLRVSATFWQNPRNHFRCQVQFYGLSENDEWTQDRAKPVTQIVSAEAWGRADCGFTSESYQQGVLSATILYEILLGKATLYAVLVSALVLMAMVKRKDSRGRAKRSGSGATNFSLLKQAGDVEENPGPTSMDWIWRILFLVGAATGAHSFEVQLVESGGGLVQPGGSLRLSCAASGYTFSDYFMSWVRQAPGKGLEWVATISNGGTYTYYPDSVKGRFTISRDNSKNTLYLQMNSLRAEDTAVYYCARFDGYIFDYWGQGTLVTVSSTRIQNPDPAVYQLRDSKSSDKSVCLFTDFDSQTNVSQSKDSDVYITDKCVLDMRSMDFKSNSAVAWSNKSDFACANAFNNSIIPEDTFFPSPESSCDVKLVEKSFETDTNLNFQNLSVIGFRILLLKVAGFNLLMTLRLWSSRAKRSGSGVKQTLNFDLLKLAGDVESNPGPSRGHMTEYKPTVRLATRDDVPRAVRTLAAAFADYPATRHTVDPDRHIERVTELQELFLTRVGLDIGKVWVADDGAAVAVWTTPESVEAGAVFAEIGPRMAELSGSRLAAQQQMEGLLAPHRPKEPAWFLATVGVSPDHQGKGLGSAVVLPGVEAAERAGVPAFLETSAPRNLPFYERLGFTVTADVEVPEGPRTWCMTRKPGA

SEQ ID NO: 22690 - protein, 617 aa, Artificial Sequence
  Synthetic Polypeptide
MALPVTALLLPLALLLHAARPDIQMTQSPSSLSASVGDRVTITCRASQDISNYLNWYQQKPGKAPKLLIYYTSRLHSGVPSRFSGSGSGTDFTLTISSLQPEDFATYYCQQGNTLPYTFGQGTKVEIKRLEDLKNVFPPEVAVFEPSEAEISHTQKATLVCLATGFYPDHVELSWWVNGKEVHSGVCTDPQPLKEQPALNDSRYCLSSRLRVSATFWQNPRNHFRCQVQFYGLSENDEWTQDRAKPVTQIVSAEAWGRADCGFTSESYQQGVLSATILYEILLGKATLYAVLVSALVLMAMVKRKDSRGRAKRSGSGATNFSLLKQAGDVEENPGPTSMDWIWRILFLVGAATGAHSFEVQLVESGGGLVQPGGSLRLSCAASGYTFSDYFMSWVRQAPGKGLEWVATISNGGTYTYYPDSVKGRFTISRDNSKNTLYLQMNSLRAEDTAVYYCARFDGYIFDYWGQGTLVTVSSTRIQNPDPAVYQLRDSKSSDKSVCLFTDFDSQTNVSQSKDSDVYITDKCVLDMRSMDFKSNSAVAWSNKSDFACANAFNNSIIPEDTFFPSPESSCDVKLVEKSFETDTNLNFQNLSVIGFRILLLKVAGFNLLMTLRLWSS

SEQ ID NO: 22691 - protein, 850 aa, Artificial Sequence
  Synthetic Polypeptide
MALPVTALLLPLALLLHAARPDIQMTQSPSSLSASVGDRVTITCRASQDISSYLNWYQQKPGKAPKLLIYYTSRLHSGVPSRFSGSGSGTDFTLTISSLQPEDFATYYCQQGNTLPYTFGQGTKVEIKRLEDLKNVFPPEVAVFEPSEAEISHTQKATLVCLATGFYPDHVELSWWVNGKEVHSGVCTDPQPLKEQPALNDSRYCLSSRLRVSATFWQNPRNHFRCQVQFYGLSENDEWTQDRAKPVTQIVSAEAWGRADCGFTSESYQQGVLSATILYEILLGKATLYAVLVSALVLMAMVKRKDSRGRAKRSGSGATNFSLLKQAGDVEENPGPTSMDWIWRILFLVGAATGAHSFEVQLVESGGGLVQPGGSLRLSCAASGFTFSDYFMSWVRQAPGKGLEWVATISNGGTYTYYPDSVKGRFTISRDNSKNTLYLQMNSLRAEDTAVYYCARFDGYIFDYWGQGTLVTVSSTRIQNPDPAVYQLRDSKSSDKSVCLFTDFDSQTNVSQSKDSDVYITDKCVLDMRSMDFKSNSAVAWSNKSDFACANAFNNSIIPEDTFFPSPESSCDVKLVEKSFETDTNLNFQNLSVIGFRILLLKVAGFNLLMTLRLWSSRAKRSGSGVKQTLNFDLLKLAGDVESNPGPSRGHMTEYKPTVRLATRDDVPRAVRTLAAAFADYPATRHTVDPDRHIERVTELQELFLTRVGLDIGKVWVADDGAAVAVWTTPESVEAGAVFAEIGPRMAELSGSRLAAQQQMEGLLAPHRPKEPAWFLATVGVSPDHQGKGLGSAVVLPGVEAAERAGVPAFLETSAPRNLPFYERLGFTVTADVEVPEGPRTWCMTRKPGA

SEQ ID NO: 22692 - protein, 850 aa, Artificial Sequence
  Synthetic Polypeptide
MALPVTALLLPLALLLHAARPDIQMTQSPSSLSASVGDRVTITCRASQDISNYLNWYQQKPGKAPKLLIYYTSRLHSGVPSRFSGSGSGTDFTLTISSLQPEDFATYYCQQGNTLPWTFGQGTKVEIKRLEDLKNVFPPEVAVFEPSEAEISHTQKATLVCLATGFYPDHVELSWWVNGKEVHSGVCTDPQPLKEQPALNDSRYCLSSRLRVSATFWQNPRNHFRCQVQFYGLSENDEWTQDRAKPVTQIVSAEAWGRADCGFTSESYQQGVLSATILYEILLGKATLYAVLVSALVLMAMVKRKDSRGRAKRSGSGATNFSLLKQAGDVEENPGPTSMDWIWRILFLVGAATGAHSFEVQLVESGGGLVQPGGSLRLSCAASGFTFSDYFMSWVRQAPGKGLEWVATISNGGTYTYYPDSVKGRFTISRDNSKNTLYLQMNSLRAEDTAVYYCARFDGYIFDYWGQGTLVTVSSTRIQNPDPAVYQLRDSKSSDKSVCLFTDFDSQTNVSQSKDSDVYITDKCVLDMRSMDFKSNSAVAWSNKSDFACANAFNNSIIPEDTFFPSPESSCDVKLVEKSFETDTNLNFQNLSVIGFRILLLKVAGFNLLMTLRLWSSRAKRSGSGVKQTLNFDLLKLAGDVESNPGPSRGHMTEYKPTVRLATRDDVPRAVRTLAAAFADYPATRHTVDPDRHIERVTELQELFLTRVGLDIGKVWVADDGAAVAVWTTPESVEAGAVFAEIGPRMAELSGSRLAAQQQMEGLLAPHRPKEPAWFLATVGVSPDHQGKGLGSAVVLPGVEAAERAGVPAFLETSAPRNLPFYERLGFTVTADVEVPEGPRTWCMTRKPGA

SEQ ID NO: 22693 - protein, 850 aa, Artificial Sequence; identical to SEQ ID NO: 22691
  Synthetic Polypeptide

SEQ ID NO: 22694 - protein, 850 aa, Artificial Sequence; identical to SEQ ID NO: 22692
  Synthetic Polypeptide

SEQ ID NO: 22695 - protein, 854 aa, Artificial Sequence
  Synthetic Polypeptide
MALPVTALLLPLALLLHAARPEVQLVESGGGLVQPGGSLRLSCAASGYTFTTYWMHWVRQAPGKGLEWVGYIRPSTGYTEYNQKFKDRFTISADTSKNTAYLQMNSLRAEDTAVYYCARSRWLLDYWGQGTLVTVSLEDLKNVFPPEVAVFEPSEAEISHTQKATLVCLATGFYPDHVELSWWVNGKEVHSGVCTDPQPLKEQPALNDSRYCLSSRLRVSATFWQNPRNHFRCQVQFYGLSENDEWTQDRAKPVTQIVSAEAWGRADCGFTSESYQQGVLSATILYEILLGKATLYAVLVSALVLMAMVKRKDSRGRAKRSGSGATNFSLLKQAGDVEENPGPTSMDWIWRILFLVGAATGAHSFEDIQMTQSPSSLSASVGDRVTITCKSSQSVLYSSNQKNYLAWFQQKPGKAPKLLIYWASTRESGVPSRFSGSGSGTDFTLTISSLQPEDFATYFCHQYLSSYTFGQGTKVEIKRTRIQNPDPAVYQLRDSKSSDKSVCLFTDFDSQTNVSQSKDSDVYITDKCVLDMRSMDFKSNSAVAWSNKSDFACANAFNNSIIPEDTFFPSPESSCDVKLVEKSFETDTNLNFQNLSVIGFRILLLKVAGFNLLMTLRLWSSRAKRSGSGVKQTLNFDLLKLAGDVESNPGPSRGHMTEYKPTVRLATRDDVPRAVRTLAAAFADYPATRHTVDPDRHIERVTELQELFLTRVGLDIGKVWVADDGAAVAVWTTPESVEAGAVFAEIGPRMAELSGSRLAAQQQMEGLLAPHRPKEPAWFLATVGVSPDHQGKGLGSAVVLPGVEAAERAGVPAFLETSAPRNLPFYERLGFTVTADVEVPEGPRTWCMTRKPGA

SEQ ID NO: 22696 - protein, 9 aa, Artificial Sequence
  Synthetic Polypeptide
GGGGGGGGG

SEQ ID NO: 22697 - protein, 850 aa, Artificial Sequence
  Synthetic Polypeptide
MALPVTALLLPLALLLHAARPDIQMTQSPSSLSASVGDRVTITCKASQDVGTAVDWYQQKPGKAPKLLISWASTRHTGVPSRFSGSGSGTDFTLTISSLQPEDFATYFCQQYNSYPLTFGQGTKVEIKRTVLEDLKNVFPPEVAVFEPSEAEISHTQKATLVCLATGFYPDHVELSWWVNGKEVHSGVCTDPQPLKEQPALNDSRYCLSSRLRVSATFWQNPRNHFRCQVQFYGLSENDEWTQDRAKPVTQIVSAEAWGRADCGFTSESYQQGVLSATILYEILLGKATLYAVLVSALVLMAMVKRKDSRGRAKRSGSGATNFSLLKQAGDVEENPGPTSMDWIWRILFLVGAATGAHSFEVQLVESGGGLVQPGGSLRLSCAASGFTFTDYTIHWVRQAPGKGLEWVANINPNNGGTTYNQKFEDRFTISRDNSKNTLYLQMNSLRAEDTAVYYCARGWNFDYWGQGTLVTVSSTRIQNPDPAVYQLRDSKSSDKSVCLFTDFDSQTNVSQSKDSDVYITDKCVLDMRSMDFKSNSAVAWSNKSDFACANAFNNSIIPEDTFFPSPESSCDVKLVEKSFETDTNLNFQNLSVIGFRILLLKVAGFNLLMTLRLWSSRAKRSGSGVKQTLNFDLLKLAGDVESNPGPSRGHMTEYKPTVRLATRDDVPRAVRTLAAAFADYPATRHTVDPDRHIERVTELQELFLTRVGLDIGKVWVADDGAAVAVWTTPESVEAGAVFAEIGPRMAELSGSRLAAQQQMEGLLAPHRPKEPAWFLATVGVSPDHQGKGLGSAVVLPGVEAAERAGVPAFLETSAPRNLPFYERLGFTVTADVEVPEGPRTWCMTRKPGA

SEQ ID NO: 22698 - protein, 848 aa, Artificial Sequence
  Synthetic Polypeptide
MALPVTALLLPLALLLHAARPDIQMTQSPSSLSASVGDRVTITCKASQDVGTAVDWYQQKPGKAPKLLIYWASTRHTGVPSRFSGSGSGTDFTLTISSLQPEDFATYYCQQYNSYPLTFGQGTKVEIKRLEDLKNVFPPEVAVFEPSEAEISHTQKATLVCLATGFYPDHVELSWWVNGKEVHSGVCTDPQPLKEQPALNDSRYCLSSRLRVSATFWQNPRNHFRCQVQFYGLSENDEWTQDRAKPVTQIVSAEAWGRADCGFTSESYQQGVLSATILYEILLGKATLYAVLVSALVLMAMVKRKDSRGRAKRSGSGATNFSLLKQAGDVEENPGPTSMDWIWRILFLVGAATGAHSFEVQLVESGGGLVQPGGSLRLSCAASGFTFTDYTIHWVRQAPGKGLEWVANINPNNGGTTYNQKFEDRFTISRDNSKNTLYLQMNSLRAEDTAVYYCARGWNFDYWGQGTLVTVSSTRIQNPDPAVYQLRDSKSSDKSVCLFTDFDSQTNVSQSKDSDVYITDKCVLDMRSMDFKSNSAVAWSNKSDFACANAFNNSIIPEDTFFPSPESSCDVKLVEKSFETDTNLNFQNLSVIGFRILLLKVAGFNLLMTLRLWSSRAKRSGSGVKQTLNFDLLKLAGDVESNPGPSRGHMTEYKPTVRLATRDDVPRAVRTLAAAFADYPATRHTVDPDRHIERVTELQELFLTRVGLDIGKVWVADDGAAVAVWTTPESVEAGAVFAEIGPRMAELSGSRLAAQQQMEGLLAPHRPKEPAWFLATVGVSPDHQGKGLGSAVVLPGVEAAERAGVPAFLETSAPRNLPFYERLGFTVTADVEVPEGPRTWCMTRKPGA

SEQ ID NO: 22699 - protein, 842 aa, Artificial Sequence
  Synthetic Polypeptide
MALPVTALLLPLALLLHAARPDIQMTQSPSSLSASVGDRVTITCKASQDVGTAVDWYQQKPGKAPKLLIYWASTRHTGVPSRFSGSGSGTDFTLTISSLQPEDFATYYCQQYNSYPLTFGQGTKVEIKRLETIFLPSIAETKLQKAGTYLCLLEKFFPDVIKIHWQEKKSNTILGSQEGNTMKTNDTYMKFSWLTVPEKSLDKEHRCIVRHENNKNGVDQEIIFPPIKTDVITMDPKDNCSKDANDTLLLQLTNTSAYYMYLLLLLKSVVYFAIITCCLLRRTAFCCNGEKSRAKRSGSGATNFSLLKQAGDVEENPGPTSMDWIWRILFLVGAATGAHSFEVQLVESGGGLVQPGGSLRLSCAASGYTFTEYTIHWVRQAPGKGLEWVANINPNNGGTTYNQKFEDRFTISRDNSKNTLYLQMNSLRAEDTAVYYCARGWNFDYWGQGTLVTVSSTRPHTKPSVFVMKNGTNVACLVKEFYPKDIRINLVSSKKITEFDPAIVISPSGKYNAVKLGKYEDSNSVTCSVQHDNKTVHSTDFEVKTDSTDHVKPKETENTKQPSKSCHKPKAIVHTEKVNMMSLTVLGLRMLFAKTVAVNFLLTAKLFFLRAKRSGSGVKQTLNFDLLKLAGDVESNPGPSRGHMTEYKPTVRLATRDDVPRAVRTLAAAFADYPATRHTVDPDRHIERVTELQELFLTRVGLDIGKVWVADDGAAVAVWTTPESVEAGAVFAEIGPRMAELSGSRLAAQQQMEGLLAPHRPKEPAWFLATVGVSPDHQGKGLGSAVVLPGVEAAERAGVPAFLETSAPRNLPFYERLGFTVTADVEVPEGPRTWCMTRKPGA

SEQ ID NO: 22700 - protein, 847 aa, Artificial Sequence
  Synthetic Polypeptide
MALPVTALLLPLALLLHAARPDIQMTQSPSSLSASVGDRVTITCKASQDVGTAVDWYQQKPGKAPKLLIYWASTRHTGVPSRFSGSGSGTDFTLTISSLQPEDFATYYCQQYNSYPLTFGQGTKVEIKRLEVSPKPTIFLPSIAETKLQKAGTYLCLLEKFFPDVIKIHWQEKKSNTILGSQEGNTMKTNDTYMKFSWLTVPEKSLDKEHRCIVRHENNKNGVDQEIIFPPIKTDVITMDPKDNCSKDANDTLLLQLTNTSAYYMYLLLLLKSVVYFAIITCCLLRRTAFCCNGEKSRAKRSGSGATNFSLLKQAGDVEENPGPTSMDWIWRILFLVGAATGAHSFEVQLVESGGGLVQPGGSLRLSCAASGYTFTEYTIHWVRQAPGKGLEWVANINPNNGGTTYNQKFEDRFTISRDNSKNTLYLQMNSLRAEDTAVYYCARGWNFDYWGQGTLVTVSSTRPHTKPSVFVMKNGTNVACLVKEFYPKDIRINLVSSKKITEFDPAIVISPSGKYNAVKLGKYEDSNSVTCSVQHDNKTVHSTDFEVKTDSTDHVKPKETENTKQPSKSCHKPKAIVHTEKVNMMSLTVLGLRMLFAKTVAVNFLLTAKLFFLRAKRSGSGVKQTLNFDLLKLAGDVESNPGPSRGHMTEYKPTVRLATRDDVPRAVRTLAAAFADYPATRHTVDPDRHIERVTELQELFLTRVGLDIGKVWVADDGAAVAVWTTPESVEAGAVFAEIGPRMAELSGSRLAAQQQMEGLLAPHRPKEPAWFLATVGVSPDHQGKGLGSAVVLPGVEAAERAGVPAFLETSAPRNLPFYERLGFTVTADVEVPEGPRTWCMTRKPGA

SEQ ID NO: 22701 - protein, 814 aa, Artificial Sequence
  Synthetic Polypeptide
MALPVTALLLPLALLLHAARPDIQMTQSPSSLSASVGDRVTITCKASQDVGTAVDWYQQKPGKAPKLLIYWASTRHTGVPSRFSGSGSGTDFTLTISSLQPEDFATYYCQQYNSYPLTFGQGTKVEIKRLEAEISHTQKATLVCLATGFYPDHVELSWWVNGKEVHSGVCTDPQPLKEQPALNDSRYCLSSRLRVSATFWQNPRNHFRCQVQFYGLSENDEWTQDRAKPVTQIVSAEAWGRADCGFTSESYQQGVLSATILYEILLGKATLYAVLVSALVLMAMVKRKDSRGRAKRSGSGATNFSLLKQAGDVEENPGPTSMDWIWRILFLVGAATGAHSFEVQLVESGGGLVQPGGSLRLSCAASGYTFTEYTIHWVRQAPGKGLEWVANINPNNGGTTYNQKFEDRFTISRDNSKNTLYLQMNSLRAEDTAVYYCARGWNFDYWGQGTLVTVSSTRDKSVCLFTDFDSQTNVSQSKDSDVYITDKCVLDMRSMDFKSNSAVAWSNKSDFACANAFNNSIIPEDTFFPSPESSCDVKLVEKSFETDTNLNFQNLSVIGFRILLLKVAGFNLLMTLRLWSSRAKRSGSGVKQTLNFDLLKLAGDVESNPGPSRGHMTEYKPTVRLATRDDVPRAVRTLAAAFADYPATRHTVDPDRHIERVTELQELFLTRVGLDIGKVWVADDGAAVAVWTTPESVEAGAVFAEIGPRMAELSGSRLAAQQQMEGLLAPHRPKEPAWFLATVGVSPDHQGKGLGSAVVLPGVEAAERAGVPAFLETSAPRNLPFYERLGFTVTADVEVPEGPRTWCMTRKPGA

SEQ ID NO: 22702 - protein, 817 aa, Artificial Sequence
  Synthetic Polypeptide
MALPVTALLLPLALLLHAARPDIQMTQSPSSLSASVGDRVTITCKASQDVGTAVDWYQQKPGKAPKLLIYWASTRHTGVPSRFSGSGSGTDFTLTISSLQPEDFATYYCQQYNSYPLTFGQGTKVEIKRLEPSEAEISHTQKATLVCLATGFYPDHVELSWWVNGKEVHSGVCTDPQPLKEQPALNDSRYCLSSRLRVSATFWQNPRNHFRCQVQFYGLSENDEWTQDRAKPVTQIVSAEAWGRADCGFTSESYQQGVLSATILYEILLGKATLYAVLVSALVLMAMVKRKDSRGRAKRSGSGATNFSLLKQAGDVEENPGPTSMDWIWRILFLVGAATGAHSFEVQLVESGGGLVQPGGSLRLSCAASGYTFTEYTIHWVRQAPGKGLEWVANINPNNGGTTYNQKFEDRFTISRDNSKNTLYLQMNSLRAEDTAVYYCARGWNFDYWGQGTLVTVSSTRDKSVCLFTDFDSQTNVSQSKDSDVYITDKCVLDMRSMDFKSNSAVAWSNKSDFACANAFNNSIIPEDTFFPSPESSCDVKLVEKSFETDTNLNFQNLSVIGFRILLLKVAGFNLLMTLRLWSSRAKRSGSGVKQTLNFDLLKLAGDVESNPGPSRGHMTEYKPTVRLATRDDVPRAVRTLAAAFADYPATRHTVDPDRHIERVTELQELFLTRVGLDIGKVWVADDGAAVAVWTTPESVEAGAVFAEIGPRMAELSGSRLAAQQQMEGLLAPHRPKEPAWFLATVGVSPDHQGKGLGSAVVLPGVEAAERAGVPAFLETSAPRNLPFYERLGFTVTADVEVPEGPRTWCMTRKPGA

SEQ ID NO: 22703 - protein, 848 aa, Artificial Sequence
  Synthetic Polypeptide
MALPVTALLLPLALLLHAARPDIQMTQSPSSLSASVGDRVTITCKASQDVGTAVDWYQQKPGKAPKLLIYWASTRHTGVPSRFSGSGSGTDFTLTISSLQPEDFATYYCQQANSYPLTFGQGTKVEIKRLEDLKNVFPPEVAVFEPSEAEISHTQKATLVCLATGFYPDHVELSWWVNGKEVHSGVCTDPQPLKEQPALNDSRYCLSSRLRVSATFWQNPRNHFRCQVQFYGLSENDEWTQDRAKPVTQIVSAEAWGRADCGFTSESYQQGVLSATILYEILLGKATLYAVLVSALVLMAMVKRKDSRGRAKRSGSGATNFSLLKQAGDVEENPGPTSMDWIWRILFLVGAATGAHSFEVQLVESGGGLVQPGGSLRLSCAASGFTFTDYTIHWVRQAPGKGLEWVANINPNNGGTTYNQKFEDRFTISRDNSKNTLYLQMNSLRAEDTAVYYCARGWNFDYWGQGTLVTVSSTRIQNPDPAVYQLRDSKSSDKSVCLFTDFDSQTNVSQSKDSDVYITDKCVLDMRSMDFKSNSAVAWSNKSDFACANAFNNSIIPEDTFFPSPESSCDVKLVEKSFETDTNLNFQNLSVIGFRILLLKVAGFNLLMTLRLWSSRAKRSGSGVKQTLNFDLLKLAGDVESNPGPSRGHMTEYKPTVRLATRDDVPRAVRTLAAAFADYPATRHTVDPDRHIERVTELQELFLTRVGLDIGKVWVADDGAAVAVWTTPESVEAGAVFAEIGPRMAELSGSRLAAQQQMEGLLAPHRPKEPAWFLATVGVSPDHQGKGLGSAVVLPGVEAAERAGVPAFLETSAPRNLPFYERLGFTVTADVEVPEGPRTWCMTRKPGA

SEQ ID NO: 22704 - protein, 893 aa, Artificial Sequence
  Synthetic Polypeptide
MALPVTALLLPLALLLHAARPACPYINIYNAEPANPSEKNSPTQYAYGTGGGGSGGGGSGGGGSEFDIQMTQSPSSLSASVGDRVTITCKASQDVGTAVDWYQQKPGKAPKLLIYWASTRHTGVPSRFSGSGSGTDFTLTISSLQPEDFATYYCQQYNSYPLTFGQGTKVEIKRLEDLKNVFPPEVAVFEPSEAEISHTQKATLVCLATGFYPDHVELSWWVNGKEVHSGVCTDPQPLKEQPALNDSRYCLSSRLRVSATFWQNPRNHFRCQVQFYGLSENDEWTQDRAKPVTQIVSAEAWGRADCGFTSESYQQGVLSATILYEILLGKATLYAVLVSALVLMAMVKRKDSRGRAKRSGSGATNFSLLKQAGDVEENPGPTSMDWIWRILFLVGAATGAHSFEVQLVESGGGLVQPGGSLRLSCAASGFTFTDYTIHWVRQAPGKGLEWVANINPNNGGTTYNQKFEDRFTISRDNSKNTLYLQMNSLRAEDTAVYYCARGWNFDYWGQGTLVTVSSTRIQNPDPAVYQLRDSKSSDKSVCLFTDFDSQTNVSQSKDSDVYITDKCVLDMRSMDFKSNSAVAWSNKSDFACANAFNNSIIPEDTFFPSPESSCDVKLVEKSFETDTNLNFQNLSVIGFRILLLKVAGFNLLMTLRLWSSRAKRSGSGVKQTLNFDLLKLAGDVESNPGPSRGHMTEYKPTVRLATRDDVPRAVRTLAAAFADYPATRHTVDPDRHIERVTELQELFLTRVGLDIGKVWVADDGAAVAVWTTPESVEAGAVFAEIGPRMAELSGSRLAAQQQMEGLLAPHRPKEPAWFLATVGVSPDHQGKGLGSAVVLPGVEAAERAGVPAFLETSAPRNLPFYERLGFTVTADVEVPEGPRTWCMTRKPGA

SEQ ID NO: 22705 - protein, 893 aa, Artificial Sequence; identical to SEQ ID NO: 22704
  Synthetic Polypeptide

SEQ ID NO: 22706 - protein, 949 aa, Artificial Sequence
  Synthetic Polypeptide
MALPVTALLLPLALLLHAARPYINIYNAEPANPSEKNSPSTQYAYGGGSYINIYNAEPANPSEKNSPSTQYAYSGGSACPYINIYNAEPANPSEKNSPTQYAYGTGGGGSGGGGSGGGGSEFDIQMTQSPSSLSASVGDRVTITCKASQDVGTAVDWYQQKPGKAPKLLIYWASTRHTGVPSRFSGSGSGTDFTLTISSLQPEDFATYYCQQYNSYPLTFGQGTKVEIKRLEDLKNVFPPEVAVFEPSEAEISHTQKATLVCLATGFYPDHVELSWWVNGKEVHSGVCTDPQPLKEQPALNDSRYCLSSRLRVSATFWQNPRNHFRCQVQFYGLSENDEWTQDRAKPVTQIVSAEAWGRADCGFTSESYQQGVLSATILYEILLGKATLYAVLVSALVLMAMVKRKDSRGRAKRSGSGATNFSLLKQAGDVEENPGPTSMDWIWRILFLVGAATGAHSFEVQLVESGGGLVQPGGSLRLSCAASGYTFTEYTIHWVRQAPGKGLEWVANINPNNGGTTYNQKFEDRFTISRDNSKNTLYLQMNSLRAEDTAVYYCARGWNFDYWGQGTLVTVSSTRIQNPDPAVYQLRDSKSSDKSVCLFTDFDSQTNVSQSKDSDVYITDKCVLDMRSMDFKSNSAVAWSNKSDFACANAFNNSIIPEDTFFPSPESSCDVKLVEKSFETDTNLNFQNLSVIGFRILLLKVAGFNLLMTLRLWSSRAKRSGSGVKQTLNFDLLKLAGDVESNPGPSRGHMTEYKPTVRLATRDDVPRAVRTLAAAFADYPATRHTVDPDRHIERVTELQELFLTRVGLDIGKVWVADDGAAVAVWTTPESVEAGAVFAEIGPRMAELSGSRLAAQQQMEGLLAPHRPKEPAWFLATVGVSPDHQGKGLGSAVVLPGVEAAERAGVPAFLETSAPRNLPFYERLGFTVTADVEVPEGPRTWCMTRKPGA

SEQ ID NO: 22707 - protein, 848 aa, Artificial Sequence
  Synthetic Polypeptide
MALPVTALLLPLALLLHAARPDIQMTQSPSSLSASVGDRVTITCKASQDVGTAVDWYQQKPGKAPKLLIYWASTRHTGVPSRFSGSGSGTDFTLTISSLQPEDFATYYCQQYNSYPLTFGQGTKVEIKRLEDLKNVFPPEVAVFEPSEAEISHTQKATLVCLATGFYPDHVELSWWVNGKEVHSGVCTDPQPLKEQPALNDSRYCLSSRLRVSATFWQNPRNHFRCQVQFYGLSENDEWTQDRAKPVTQIVSAEAWGRADCGFTSESYQQGVLSATILYEILLGKATLYAVLVSALVLMAMVKRKDSRGRAKRSGSGATNFSLLKQAGDVEENPGPTSMDWIWRILFLVGAATGAHSFEVQLVESGGGLVQPGGSLRLSCAASGYTFTEYTIHWVRQAPGKGLEWVANINPNNGGTTYNQKFEDRFTISRDNSKNTLYLQMNSLRAEDTAVYYCARGWNFDYWGQGTLVTVSSTRIQNPDPAVYQLRDSKSSDKSVCLFTDFDSQTNVSQSKDSDVYITDKCVLDMRSMDFKSNSAVAWSNKSDFACANAFNNSIIPEDTFFPSPESSCDVKLVEKSFETDTNLNFQNLSVIGFRILLLKVAGFNLLMTLRLWSSRAKRSGSGVKQTLNFDLLKLAGDVESNPGPSRGHMTEYKPTVRLATRDDVPRAVRTLAAAFADYPATRHTVDPDRHIERVTELQELFLTRVGLDIGKVWVADDGAAVAVWTTPESVEAGAVFAEIGPRMAELSGSRLAAQQQMEGLLAPHRPKEPAWFLATVGVSPDHQGKGLGSAVVLPGVEAAERAGVPAFLETSAPRNLPFYERLGFTVTADVEVPEGPRTWCMTRKPGA

SEQ ID NO: 22708 - protein, 9 aa, Artificial Sequence
  Synthetic Polypeptide
GGGGGGGGG

SEQ ID NO: 22709 - protein, 627 aa, Artificial Sequence
  Synthetic Polypeptide
MALPVTALLLPLALLLHAARPDIQMTQSPSSLSASVGDRVTITCRASQDVNTAVAWYQQKPGKAPKLLIYSASFLYSGVPSRFSGSRSGTDFTLTISSLQPEDFATYYCQQAYTTPPTFGQGTKVEIKRTLEIQNPDPAVYQLRDSKSSDKSVCLFTDFDSQTNVSQSKDSDVYITDKCVLDMRSMDFKSNSAVAWSNKSDFACANAFNNSIIPEDTFFPSPESSCDVKLVEKSFETDTNLNFQNLSVIGFRILLLKVAGFNLLMTLRLWSSSSRAKRSGSGVKQTLNFDLLKLAGDVESNPGPTSMDWIWRILFLVGAATGAHSFEVQLVESGGGLVQPGGSLRLSCAASGFNIKDTYIHWVRQAPGKGLEWVARIYPTNGYTRYADSVKGRFTISADTSKNTAYLQMNSLRAEDTAVYYCSRWGGWGFYAMDYWGQGTLVTVSSTREDLKNVFPPEVAVFEPSEAEISHTQKATLVCLATGFYPDHVELSWWVNGKEVHSGVCTDPQPLKEQPALNDSRYCLSSRLRVSATFWQNPRNHFRCQVQFYGLSENDEWTQDRAKPVTQIVSAEAWGRADCGFTSESYQQGVLSATILYEILLGKATLYAVLVSALVLMAMVKRKDSRG

SEQ ID NO: 22710 - protein, 884 aa, Artificial Sequence
  Synthetic Polypeptide
MALPVTALLLPLALLLHAARPDIQMTQSPSSLSASVGDRVTITCRASQDVNTAVAWYQQKPGKAPKLLIYSASFLYSGVPSRFSGSRSGTDFTLTISSLQPEDFATYYCQQAYTTPPTFGQGTKVEIKRTLEGKPIPNPLLGLDSTGSGEDLKNVFPPEVAVFEPSKAEIAHTQKATLVCLATGFYPDHVELSWWVNGKEVHSGVCTDPQPLKEQPALNDSRYCLSSRLRVSATFWQNPRNHFRCQVQFYGLSENDEWTQDRAKPVTQIVSAEAWGRADCGITSASYHQGVLSATILYEILLGKATLYAVLVSALVLMAMVKRKDSRGRAKRSGSGATNFSLLKQAGDVEENPGPTSMDWIWRILFLVGAATGAHSFEVQLVESGGGLVQPGGSLRLSCAASGFNIKDTYIHWVRQAPGKGLEWVARIYPTNGYTRYADSVKGRFTISADTSKNTAYLQMNSLRAEDTAVYYCSRWGGDGFYAMDVWGQGTLVTVSSTREQKLISEEDGSGIQNPDPAVYQLRDSKSSDKSVCLFTDFDSQTNVSQSKDSDVYITDKCVLDMRSMDFKSNSAVAWSNKSDFACANAFNNSIIPEDTFFPSSDVPCDVKLVEKSFETDTNLNFQNLSVIGFRILLLKVAGFNLLMTLRLWSSRAKRSGSGVKQTLNFDLLKLAGDVESNPGPSRGHMTEYKPTVRLATRDDVPRAVRTLAAAFADYPATRHTVDPDRHIERVTELQELFLTRVGLDIGKVWVADDGAAVAVWTTPESVEAGAVFAEIGPRMAELSGSRLAAQQQMEGLLAPHRPKEPAWFLATVGVSPDHQGKGLGSAVVLPGVEAAERAGVPAFLETSAPRNLPFYERLGFTVTADVEVPEGPRTWCMTRKPGA

SEQ ID NO: 22711 - protein, 627 aa, Artificial Sequence
  Synthetic Polypeptide
MALPVTALLLPLALLLHAARPDIQMTQSPSSLSASVGDRVTITCRASQDVNTAVAWYQQKPGKAPKLLIYSASFLYSGVPSRFSGSRSGTDFTLTISSLQPEDFATYYCQQHYTTPPTFGQGTKVEIKRTLEIQNPDPAVYQLRDSKSSDKSVCLFTDFDSQTNVSQSKDSDVYITDKCVLDMRSMDFKSNSAVAWSNKSDFACANAFNNSIIPEDTFFPSPESSCDVKLVEKSFETDTNLNFQNLSVIGFRILLLKVAGFNLLMTLRLWSSSSRAKRSGSGVKQTLNFDLLKLAGDVESNPGPTSMDWIWRILFLVGAATGAHSFEVQLVESGGGLVQPGGSLRLSCAASGFNIKDTYIHWVRQAPGKGLEWVARIYPTNGYTRYADSVKGRFTISADTSKNTAYLQMNSLRAEDTAVYYCSRWGGAGAYAMDVWGQGTLVTVSSTREDLKNVFPPEVAVFEPSEAEISHTQKATLVCLATGFYPDHVELSWWVNGKEVHSGVCTDPQPLKEQPALNDSRYCLSSRLRVSATFWQNPRNHFRCQVQFYGLSENDEWTQDRAKPVTQIVSAEAWGRADCGFTSESYQQGVLSATILYEILLGKATLYAVLVSALVLMAMVKRKDSRG

SEQ ID NO: 22712 - protein, 882 aa, Artificial Sequence
  Synthetic Polypeptide
MALPVTALLLPLALLLHAARPDIQMTQSPSSLSASVGDRVTITCRASQDVNTAVAWYQQKPGKAPKLLIYSASFLESGVPSRFSGSRSGTDFTLTISSLQPEDFATYYCQQHYTTPPTFGQTKVEIKRLEGKPIPNPLLGLDSTGSGEDLKNVFPPEVAVFEPSKAEIAHTQKATLVCLATGFYPDHVELSWWVNGKEVHSGVCTDPQPLKEQPALNDSRYCLSSRLRVSATFWQNPRNHFRCQVQFYGLSENDEWTQDRAKPVTQIVSAEAWGRADCGITSASYHQGVLSATILYEILLGKATLYAVLVSALVLMAMVKRKDSRGRAKRSGSGATNFSLLKQAGDVEENPGPTSMDWIWRILFLVGAATGAHSFEVQLVESGGGLVQPGGSLRLSCAASGFNIKDTYIHWVRQAPGKGLEWVARIYPTNGYTRYADSVKGRFTISADTSKNTAYLQMNSLRAEDTAVYYCSRWGGAGAYAMDVWGQGTLVTVSSTREQKLISEEDGSGIQNPDPAVYQLRDSKSSDKSVCLFTDFDSQTNVSQSKDSDVYITDKCVLDMRSMDFKSNSAVAWSNKSDFACANAFNNSIIPEDTFFPSSDVPCDVKLVEKSFETDTNLNFQNLSVIGFRILLLKVAGFNLLMTLRLWSSRAKRSGSGVKQTLNFDLLKLAGDVESNPGPSRGHMTEYKPTVRLATRDDVPRAVRTLAAAFADYPATRHTVDPDRHIERVTELQELFLTRVGLDIGKVWVADDGAAVAVWTTPESVEAGAVFAEIGPRMAELSGSRLAAQQQMEGLLAPHRPKEPAWFLATVGVSPDHQGKGLGSAVVLPGVEAAERAGVPAFLETSAPRNLPFYERLGFTVTADVEVPEGPRTWCMTRKPGA

SEQ ID NO: 22713 - protein, 625 aa, Artificial Sequence
  Synthetic Polypeptide
MALPVTALLLPLALLLHAARPDIQMTQSPSSLSASVGDRVTITCRASQDVNTAVAWYQQKPGKAPKLLIYSASFLESGVPSRFSGSRSGTDFTLTISSLQPEDFATYYCQQHYTTPPTFGQTKVEIKRLEIQNPDPAVYQLRDSKSSDKSVCLFTDFDSQTNVSQSKDSDVYITDKCVLDMRSMDFKSNSAVAWSNKSDFACANAFNNSIIPEDTFFPSPESSCDVKLVEKSFETDTNLNFQNLSVIGFRILLLKVAGFNLLMTLRLWSSSSRAKRSGSGVKQTLNFDLLKLAGDVESNPGPTSMDWIWRILFLVGAATGAHSFEVQLVESGGGLVQPGGSLRLSCAASGFNIKDTYIHWVRQAPGKGLEWVARIYPTNGYTRYADSVKGRFTISADTSKNTAYLQMNSLRAEDTAVYYCSRWGGAGAYAMDVWGQGTLVTVSSTREDLKNVFPPEVAVFEPSEAEISHTQKATLVCLATGFYPDHVELSWWVNGKEVHSGVCTDPQPLKEQPALNDSRYCLSSRLRVSATFWQNPRNHFRCQVQFYGLSENDEWTQDRAKPVTQIVSAEAWGRADCGFTSESYQQGVLSATILYEILLGKATLYAVLVSALVLMAMVKRKDSRG

SEQ ID NO: 22714 - protein, 627 aa, Artificial Sequence
  Synthetic Polypeptide
MALPVTALLLPLALLLHAARPDIQMTQSPSSLSASVGDRVTITCRASQDVNTAVAWYQQKPGKAPKLLIYSASFLYSGVPSRFSGSRSGTDFTLTISSLQPEDFATYYCQQHYTTPPTFGQGTKVEIKRTLEIQNPDPAVYQLRDSKSSDKSVCLFTDFDSQTNVSQSKDSDVYITDKCVLDMRSMDFKSNSAVAWSNKSDFACANAFNNSIIPEDTFFPSPESSCDVKLVEKSFETDTNLNFQNLSVIGFRILLLKVAGFNLLMTLRLWSSSSRAKRSGSGVKQTLNFDLLKLAGDVESNPGPTSMDWIWRILFLVGAATGAHSFEVQLVESGGGLVQPGGSLRLSCAASGFNIKDTYIHWVRQAPGKGLEWVARIYPTNGYTRYADSVKGRFTISADTSKNTAYLQMNSLRAEDTAVYYCSRWGGDGFAAMDVWGQGTLVTVSSTREDLKNVFPPEVAVFEPSEAEISHTQKATLVCLATGFYPDHVELSWWVNGKEVHSGVCTDPQPLKEQPALNDSRYCLSSRLRVSATFWQNPRNHFRCQVQFYGLSENDEWTQDRAKPVTQIVSAEAWGRADCGFTSESYQQGVLSATILYEILLGKATLYAVLVSALVLMAMVKRKDSRG

SEQ ID NO: 22715 - protein, 9 aa, Artificial Sequence
  Synthetic Polypeptide
GGGGGGGGG

SEQ ID NO: 22716 - protein, 733 aa, Artificial Sequence
  Synthetic Polypeptide
MALPVTALLLPLALLLHAARPEVQLLESGGGLVQPGGSLRLSCAASGFTFSSYAMSWVRQAPGKGLEWVSSISGSGDYIYYADSVKGRFTISRDISKNTLYLQMNSLRAEDTAVYYCAKEGTGANSSLADYRGQGTLVTVSSLESGGGGSFEVQLVESGGGLVQPGGSLRLSCAASGYAFSSYWVNWVRQAPGKGLEWVAQIYPGDGDTNYNGKFKGRFTISRDNSKNTLYLQMNSLRAEDTAVYYCARSITTVVGCAMDYRGQGTLVTVSSTREQKLISEEDLAKPTTTPAPRPPTPAPTIASQPLSLRPEACRPAAGGAVHTRGLDFACDIYIWAPLAGTCGVLLLSLVITLYCKRGRKKLLYIFKQPFMRPVQTTQEEDGCSCRFPEEEEGGCELRVKFSRSADAPAYQQGQNQLYNELNLGRREEYDVLDKRRGRDPEMGGKPRRKNPQEGLYNELQKDKMAEAYSEIGMKGERRRGKGHDGLYQGLSTATKDTYDALHMQALPPRSSGSGEGRGSLLTCGDVEENPGPHMTEYKPTVRLATRDDVPRAVRTLAAAFADYPATRHTVDPDRHIERVTELQELFLTRVGLDIGKVWVADDGAAVAVWTTPESVEAGAVFAEIGPRMAELSGSRLAAQQQMEGLLAPHRPKEPAWFLATVGVSPDHQGKGLGSAVVLPGVEAAERAGVPAFLETSAPRNLPFYERLGFTVTADVEVPEGPRTWCMTRKPGA

SEQ ID NO: 22717 - protein, 730 aa, Artificial Sequence
  Synthetic Polypeptide
MALPVTALLLPLALLLHAARPQVQLVESGGGLVQPGGSLRLSCAASGFTFTNHAMSWVRQAPGKGLELVSSISGNGRTTYYADSVKGRFTISRDISKNTLDLQMNSLRAEDTAVYYCAKDGGETLVDSRGQGTLVTVSSLESGGGGSFEVQLVESGGGLVQPGGSLRLSCAASGYAFSSYWVNWVRQAPGKGLEWVAQIYPGDGDTNYNGKFKGRFTISRDNSKNTLYLQMSNLRAEDTAVYYCARSITTVVGCAMDYRGQGTLVTVSSTREQKLISEEDLAKPTTTPAPRPPTPAPTIASQPLSLRPEACRPAAGGAVHTRGLDFACDIYIWAPLAGTCGVLLLSLVITLYCKRGRKKLLYIFKQPFMRPVQTTQEEDGCSCRFPEEEEGGCELRVKFSRSADAPAYQQGQNQLYNELNLGRREEYDVLDKRRGRDPEMGGKPRRKNPQEGLYNELQKDKMAEAYSEIGMKGERRRGKGHDGLYQGLSTATKDTYDALHMQALPPRSSGSGEGRGSLLTCGDVEENPGPHMTEYKPTVRLATRDDVPRAVRTLAAAFADYPATRHTVDPDRHIERVTELQELFLTRVGLDIGKVWVADDGAAVAVWTTPESVEAGAVFAEIGPRMAELSGSRLAAQQQMEGLLAPHRPKEPAWFLATVGVSPDHQGKGLGSAVVLPGVEAAERAGVPAFLETSAPRNLPFYERLGFTVTADVEVPEGPRTWCMTRKPGA

SEQ ID NO: 22718 - protein, 734 aa, Artificial Sequence
  Synthetic Polypeptide
MALPVTALLLPLALLLHAARPEVQLLESGGGLVQPGGSLRLSCAASGFTFSSYAMSWVRQAPGKGLEWVSSISGSGDYIYYADSVKGRFTISRDISKNTLYLQMNSLRAEDTAVYYCAKEGTGANSSLADYRGQGTLVTVSSLESGGGGSFEEVQLLESGGGLVQPGGSLRLSCAASGFTFSSYAMSWVRQAPGKGLEWVSSISGSGDYIYYADSVKGRFTISRDISKNTLYLQMNSLRAEDTAVYYCAKEGTGANSSLADYRGQGTLVTVSSTREQKLISEEDLAKPTTTPAPRPPTPAPTIASQPLSLRPEACRPAAGGAVHTRGLDFACDIYIWAPLAGTCGVLLLSLVITLYCKRGRKKLLYIFKQPFMRPVQTTQEEDGCSCRFPEEEEGGCELRVKFSRSADAPAYQQGQNQLYNELNLGRREEYDVLDKRRGRDPEMGGKPRRKNPQEGLYNELQKDKMAEAYSEIGMKGERRRGKGHDGLYQGLSTATKDTYDALHMQALPPRSSGSGEGRGSLLTCGDVEENPGPHMTEYKPTVRLATRDDVPRAVRTLAAAFADYPATRHTVDPDRHIERVTELQELFLTRVGLDIGKVWVADDGAAVAVWTTPESVEAGAVFAEIGPRMAELSGSRLAAQQQMEGLLAPHRPKEPAWFLATVGVSPDHQGKGLGSAVVLPGVEAAERAGVPAFLETSAPRNLPFYERLGFTVTADVEVPEGPRTWCMTRKPGA

SEQ ID NO: 22719 - protein, 731 aa, Artificial Sequence
  Synthetic Polypeptide
MALPVTALLLPLALLLHAARPEVQLLESGGGLVQPGGSLRLSCAASGFTFSSYAMSWVRQAPGKGLEWVSSISGSGDYIYYADSVKGRFTISRDISKNTLYLQMNSLRAEDTAVYYCAKEGTGANSSLADYRGQGTLVTVSSLESGGGGSFEQVQLVESGGGLVQPGGSLRLSCAASGFTFTNHAMSWVRQAPGKGLELVSSISGNGRTTYYADSVKGRFTISRDISKNTLDLQMNSLRAEDTAVYYCAKDGGETLVDSRGQGTLVTVSSTREQKLISEEDLAKPTTTPAPRPPTPAPTIASQPLSLRPEACRPAAGGAVHTRGLDFACDIYIWAPLAGTCGVLLLSLVITLYCKRGRKKLLYIFKQPFMRPVQTTQEEDGCSCRFPEEEEGGCELRVKFSRSADAPAYQQGQNQLYNELNLGRREEYDVLDKRRGRDPEMGGKPRRKNPQEGLYNELQKDKMAEAYSEIGMKGERRRGKGHDGLYQGLSTATKDTYDALHMQALPPRSSGSGEGRGSLLTCGDVEENPGPHMTEYKPTVRLATRDDVPRAVRTLAAAFADYPATRHTVDPDRHIERVTELQELFLTRVGLDIGKVWVADDGAAVAVWTTPESVEAGAVFAEIGPRMAELSGSRLAAQQQMEGLLAPHRPKEPAWFLATVGVSPDHQGKGLGSAVVLPGVEAAERAGVPAFLETSAPRNLPFYERLGFTVTADVEVPEGPRTWCMTRKPGA

SEQ ID NO: 22720 - protein, 731 aa, Artificial Sequence
  Synthetic Polypeptide
MALPVTALLLPLALLLHAARPQVQLVESGGGLVQPGGSLRLSCAASGFTFTNHAMSWVRQAPGKGLELVSSISGNGRTTYYADSVKGRFTISRDISKNTLDLQMNSLRAEDTAVYYCAKDGGETLVDSRGQGTLVTVSSLESGGGGSFEEVQLLESGGGLVQPGGSLRLSCAASGFTFSSYAMSWVRQAPGKGLEWVSSISGSGDYIYYADSVKGRFTISRDISKNTLYLQMNSLRAEDTAVYYCAKEGTGANSSLADYRGQGTLVTVSSTREQKLISEEDLAKPTTTPAPRPPTPAPTIASQPLSLRPEACRPAAGGAVHTRGLDFACDIYIWAPLAGTCGVLLLSLVITLYCKRGRKKLLYIFKQPFMRPVQTTQEEDGCSCRFPEEEEGGCELRVKFSRSADAPAYQQGQNQLYNELNLGRREEYDVLDKRRGRDPEMGGKPRRKNPQEGLYNELQKDKMAEAYSEIGMKGERRRGKGHDGLYQGLSTATKDTYDALHMQALPPRSSGSGEGRGSLLTCGDVEENPGPHMTEYKPTVRLATRDDVPRAVRTLAAAFADYPATRHTVDPDRHIERVTELQELFLTRVGLDIGKVWVADDGAAVAVWTTPESVEAGAVFAEIGPRMAELSGSRLAAQQQMEGLLAPHRPKEPAWFLATVGVSPDHQGKGLGSAVVLPGVEAAERAGVPAFLETSAPRNLPFYERLGFTVTADVEVPEGPRTWCMTRKPGA

SEQ ID NO: 22721 - protein, 728 aa, Artificial Sequence
  Synthetic Polypeptide
MALPVTALLLPLALLLHAARPQVQLVESGGGLVQPGGSLRLSCAASGFTFTNHAMSWVRQAPGKGLELVSSISGNGRTTYYADSVKGRFTISRDISKNTLDLQMNSLRAEDTAVYYCAKDGGETLVDSRGQGTLVTVSSLESGGGGSFEQVQLVESGGGLVQPGGSLRLSCAASGFTFTNHAMSWVRQAPGKGLELVSSISGNGRTTYYADSVKGRFTISRDISKNTLDLQMNSLRAEDTAVYYCAKDGGETLVDSRGQGTLVTVSSTREQKLISEEDLAKPTTTPAPRPPTPAPTIASQPLSLRPEACRPAAGGAVHTRGLDFACDIYIWAPLAGTCGVLLLSLVITLYCKRGRKKLLYIFKQPFMRPVQTTQEEDGCSCRFPEEEEGGCELRVKFSRSADAPAYQQGQNQLYNELNLGRREEYDVLDKRRGRDPEMGGKPRRKNPQEGLYNELQKDKMAEAYSEIGMKGERRRGKGHDGLYQGLSTATKDTYDALHMQALPPRSSGSGEGRGSLLTCGDVEENPGPHMTEYKPTVRLATRDDVPRAVRTLAAAFADYPATRHTVDPDRHIERVTELQELFLTRVGLDIGKVWVADDGAAVAVWTTPESVEAGAVFAEIGPRMAELSGSRLAAQQQMEGLLAPHRPKEPAWFLATVGVSPDHQGKGLGSAVVLPGVEAAERAGVPAFLETSAPRNLPFYERLGFTVTADVEVPEGPRTWCMTRKPGA

SEQ ID NO: 22722 - protein, 364 aa, Artificial Sequence
  Synthetic Polypeptide
MALPVTALLLPLALLLHAARPQVQLVESGGGLVQPGGSLRLSCAASGFTFTNHAMSWVRQAPGKGLELVSSISGNGRTTYYADSVKGRFTISRDISKNTLDLQMNSLRAEDTAVYYCAKDGGETLVDSRGQGTLVTVSSTRTTTPAPRPPTPAPTIASQPLSLRPEACRPAAGGAVHTRGLDFACDIYIWAPLAGTCGVLLLSLVITLYCKRGRKKLLYIFKQPFMRPVQTTQEEDGCSCRFPEEEEGGCELRVKFSRSADAPAYQQGQNQLYNELNLGRREEYDVLDKRRGRDPEMGGKPRRKNPQEGLYNELQKDKMAEAYSEIGMKGERRRGKGHDGLYQGLSTATKDTYDALHMQALPPR

SEQ ID NO: 22723 - protein, 366 aa, Artificial Sequence
  Synthetic Polypeptide
MALPVTALLLPLALLLHAARPEVQLVESGGGLVQPGGSLRLSCTFSGGTFSSYTMGWFRQAPGKEREFVAEVRWGGVTTYSNSLKDRFSISEDSVKNAVYLQMNSLKPEDTAVYYCAAVRQMYMTVVPDYWGQGTLVTVSSTRTTTPAPRPPTPAPTIASQPLSLRPEACRPAAGGAVHTRGLDFACDIYIWAPLAGTCGVLLLSLVITLYCKRGRKKLLYIFKQPFMRPVQTTQEEDGCSCRFPEEEEGGCELRVKFSRSADAPAYQQGQNQLYNELNLGRREEYDVLDKRRGRDPEMGGKPRRKNPQEGLYNELQKDKMAEAYSEIGMKGERRRGKGHDGLYQGLSTATKDTYDALHMQALPPR

SEQ ID NO: 22724 - protein, 495 aa, Artificial Sequence
  Synthetic Polypeptide
MALPVTALLLPLALLLHAARPQLQLQESGPGLVKPSETLSLTCTVSGDSISSGDYYWGWIRQPPGKGLEWIGHIYYSGVTYYNPSLKSRVTISVDTSRNQFSLKLSSVTAADTAVYYCTREDSSNWRSRGQGTLVTVSSLESGGGGSFEEVQLLESGGGLVQPGGSLRLSCAASGFTFSSYAMSWVRQAPGKGLEWVSSISGSGDYIYYADSVKGRFTISRDISKNTLYLQMNSLRAEDTAVYYCAKEGTGANSSLADYRGQGTLVTVSSTRTTTPAPRPPTPAPTIASQPLSLRPEACRPAAGGAVHTRGLDFACDIYIWAPLAGTCGVLLLSLVITLYCKRGRKKLLYIFKQPFMRPVQTTQEEDGCSCRFPEEEEGGCELRVKFSRSADAPAYQQGQNQLYNELNLGRREEYDVLDKRRGRDPEMGGKPRRKNPQEGLYNELQKDKMAEAYSEIGMKGERRRGKGHDGLYQGLSTATKDTYDALHMQALPPR

SEQ ID NO: 22725 - protein, 492 aa, Artificial Sequence
  Synthetic Polypeptide
MALPVTALLLPLALLLHAARPQLQLQESGPGLVKPSETLSLTCTVSGDSISSGDYYWGWIRQPPGKGLEWIGHIYYSGVTYYNPSLKSRVTISVDTSRNQFSLKLSSVTAADTAVYYCTREDSSNWRSRGQGTLVTVSSLESGGGGSFEQVQLVESGGGLVQPGGSLRLSCAASGFTFTNHAMSWVRQAPGKGLELVSSISGNGRTTYYADSVKGRFTISRDISKNTLDLQMNSLRAEDTAVYYCAKDGGETLVDSRGQGTLVTVSSTRTTTPAPRPPTPAPTIASQPLSLRPEACRPAAGGAVHTRGLDFACDIYIWAPLAGTCGVLLLSLVITLYCKRGRKKLLYIFKQPFMRPVQTTQEEDGCSCRFPEEEEGGCELRVKFSRSADAPAYQQGQNQLYNELNLGRREEYDVLDKRRGRDPEMGGKPRRKNPQEGLYNELQKDKMAEAYSEIGMKGERRRGKGHDGLYQGLSTATKDTYDALHMQALPPR

SEQ ID NO: 22726 - protein, 492 aa, Artificial Sequence
  Synthetic Polypeptide
MALPVTALLLPLALLLHAARPQLQLQESGPGLVKPSETLSLTCTVSGDSISSGDYYWGWIRQPPGKGLEWIGHIYYSGVTYYNPSLKSRVTISVDTSRNQFSLKLSSVTAADTAVYYCTREDSSNWRSRGQGTLVTVSSLESGGGGSFEVQLLESGGGLIQPGGSLRLSCAASGFTFSSHAMTWVRQAPGKGLEWVSAISGSGDYTHYADSVKGRFTISRDNSKNTVYLQMNSLRAEDSAVYYCAKDEDGGSLLGHRGQGTLVTVSSTRTTTPAPRPPTPAPTIASQPLSLRPEACRPAAGGAVHTRGLDFACDIYIWAPLAGTCGVLLLSLVITLYCKRGRKKLLYIFKQPFMRPVQTTQEEDGCSCRFPEEEEGGCELRVKFSRSADAPAYQQGQNQLYNELNLGRREEYDVLDKRRGRDPEMGGKPRRKNPQEGLYNELQKDKMAEAYSEIGMKGERRRGKGHDGLYQGLSTATKDTYDALHMQALPPR

SEQ ID NO: 22727 - protein, 492 aa, Artificial Sequence
  Synthetic Polypeptide
MALPVTALLLPLALLLHAARPEVQLVESGGGLVQPGGSLRLSCTFSGGTFSSYTMGWFRQAPGKEREFVAEVRWGGVTTYSNSLKDRFSISEDSVKNAVYLQMNSLKPEDTAVYYCAAVRQMYMTVVPDYWGQGTLVTVSSSGGGGSFEQLQLQESGPGLVKPSETLSLTCTVSGGSISSGDYYWGWIRQPPGKGLEWIGHIYYSGATYYNPSLKSRVTISVDTSRNQFSLKLSSVTAADTAVYYCTRDDSSNWRSRGQGTLVTVSSTRTTTPAPRPPTPAPTIASQPLSLRPEACRPAAGGAVHTRGLDFACDIYIWAPLAGTCGVLLLSLVITLYCKRGRKKLLYIFKQPFMRPVQTTQEEDGCSCRFPEEEEGGCELRVKFSRSADAPAYQQGQNQLYNELNLGRREEYDVLDKRRGRDPEMGGKPRRKNPQEGLYNELQKDKMAEAYSEIGMKGERRRGKGHDGLYQGLSTATKDTYDALHMQALPPR

SEQ ID NO: 22728 - protein, 365 aa, Artificial Sequence
  Synthetic Polypeptide
MALPVTALLLPLALLLHAARPEVQLVESGGGLVQPGGSLRLSCAASGFNIKDTCIGWVRRAPGKEEELVAKICKYSGHTRYADSVKGRFTISADTSKNTAYLQMNSLRAEDTAVYYCAAVSVRDGHYNYWGQGTTVTVSSTRTTTPAPRPPTPAPTIASQPLSLRPEACRPAAGGAVHTRGLDFACDIYIWAPLAGTCGVLLLSLVITLYCKRGRKKLLYIFKQPFMRPVQTTQEEDGCSCRFPEEEEGGCELRVKFSRSADAPAYQQGQNQLYNELNLGRREEYDVLDKRRGRDPEMGGKPRRKNPQEGLYNELQKDKMAEAYSEIGMKGERRRGKGHDGLYQGLSTATKDTYDALHMQALPPR

SEQ ID NO: 22729 - protein, 728 aa, Artificial Sequence; identical to SEQ ID NO: 17519
  Synthetic Polypeptide

SEQ ID NO: 22730 - protein, 728 aa, Artificial Sequence
  Synthetic Polypeptide
MALPVTALLLPLALLLHAARPQLQLQESGPGLVKPSETLSLTCTVSGDSISSGDYYWGWIRQPPGKGLEWIGHIYYSGVTYYNPSLKSRVTISVDTSRNQFSLKLSSVTAADTAVYYCTREDSSNWRSRGQGTLVTVSSLESGGGGSFEQLQLQESGPGLVKPSETLSLTCTVSGGSISSGDYYWGWIRQPPGKGLEWIGHIYYSGATYYNPSLKSRVTISVDTSRNQFSLKLSSVTAADTAVYYCTRDDSSNWRSRGQGTLVTVSSTREQKLISEEDLAKPTTTPAPRPPTPAPTIASQPLSLRPEACRPAAGGAVHTRGLDFACDIYIWAPLAGTCGVLLLSLVITLYCKRGRKKLLYIFKQPFMRPVQTTQEEDGCSCRFPEEEEGGCELRVKFSRSADAPAYQQGQNQLYNELNLGRREEYDVLDKRRGRDPEMGGKPRRKNPQEGLYNELQKDKMAEAYSEIGMKGERRRGKGHDGLYQGLSTATKDTYDALHMQALPPRSSGSGEGRGSLLTCGDVEENPGPHMTEYKPTVRLATRDDVPRAVRTLAAAFADYPATRHTVDPDRHIERVTELQELFLTRVGLDIGKVWVADDGAAVAVWTTPESVEAGAVFAEIGPRMAELSGSRLAAQQQMEGLLAPHRPKEPAWFLATVGVSPDHQGKGLGSAVVLPGVEAAERAGVPAFLETSAPRNLPFYERLGFTVTADVEVPEGPRTWCMTRKPGA

SEQ ID NO: 22731 - protein, 722 aa, Artificial Sequence; identical to SEQ ID NO: 17227
  Synthetic Polypeptide

SEQ ID NO: 22732 - protein, 736 aa, Artificial Sequence; identical to SEQ ID NO: 17154
  Synthetic Polypeptide

SEQ ID NO: 22733 - protein, 723 aa, Artificial Sequence
  Synthetic Polypeptide
MALPVTALLLPLALLLHAARPQLQLQESGPGLVKPSETLSLTCTVSGDSISSGDYYWGWIRQPPGKGLEWIGHIYYSGVTYYNPSLKSRVTISVDTSRNQFSLKLSSVTAADTAVYYCTREDSSNWRSRGQGTLVTVSSLESGGGGSFEEVQLLESGGGLVQPGGSLRLSCAASGFSFSSYALSWVRQAPGKGLEWVSSIGENDGTTDYADAVKGRFTISRDNSKNTLYLQMNSLRVEDTAVYYCVKDGVHWGQGTLVTVSSTREQKLISEEDLAKPTTTPAPRPPTPAPTIASQPLSLRPEACRPAAGGAVHTRGLDFACDIYIWAPLAGTCGVLLLSLVITLYCKRGRKKLLYIFKQPFMRPVQTTQEEDGCSCRFPEEEEGGCELRVKFSRSADAPAYQQGQNQLYNELNLGRREEYDVLDKRRGRDPEMGGKPRRKNPQEGLYNELQKDKMAEAYSEIGMKGERRRGKGHDGLYQGLSTATKDTYDALHMQALPPRSSGSGEGRGSLLTCGDVEENPGPHMTEYKPTVRLATRDDVPRAVRTLAAAFADYPATRHTVDPDRHIERVTELQELFLTRVGLDIGKVWVADDGAAVAVWTTPESVEAGAVFAEIGPRMAELSGSRLAAQQQMEGLLAPHRPKEPAWFLATVGVSPDHQGKGLGSAVVLPGVEAAERAGVPAFLETSAPRNLPFYERLGFTVTADVEVPEGPRTWCMTRKPGA

SEQ ID NO: 22734 - protein, 729 aa, Artificial Sequence; identical to SEQ ID NO: 17592
  Synthetic Polypeptide

SEQ ID NO: 22735 - protein, 730 aa, Artificial Sequence
  Synthetic Polypeptide
MALPVTALLLPLALLLHAARPEVQLVESGGGLVQPGGSLRLSCTFSGGTFSSYTMGWFRQAPGKEREFVAEVRWGGVTTYSNSLKDRFSISEDSVKNAVYLQMNSLKPEDTAVYYCAAVRQMYMTVVPDYWGQGTLVTVSSLESGGGGSFEVQLLESGGGLIQPGGSLRLSCAASGFTFSSHAMTWVRQAPGKGLEWVSAISGSGDYTHYADSVKGRFTISRDNSKNTVYLQMNSLRAEDSAVYYCAKDEDGGSLLGHRGQGTLVTVSSTREQKLISEEDLAKPTTTPAPRPPTPAPTIASQPLSLRPEACRPAAGGAVHTRGLDFACDIYIWAPLAGTCGVLLLSLVITLYCKRGRKKLLYIFKQPFMRPVQTTQEEDGCSCRFPEEEEGGCELRVKFSRSADAPAYQQGQNQLYNELNLGRREEYDVLDKRRGRDPEMGGKPRRKNPQEGLYNELQKDKMAEAYSEIGMKGERRRGKGHDGLYQGLSTATKDTYDALHMQALPPRSSGSGEGRGSLLTCGDVEENPGPHMTEYKPTVRLATRDDVPRAVRTLAAAFADYPATRHTVDPDRHIERVTELQELFLTRVGLDIGKVWVADDGAAVAVWTTPESVEAGAVFAEIGPRMAELSGSRLAAQQQMEGLLAPHRPKEPAWFLATVGVSPDHQGKGLGSAVVLPGVEAAERAGVPAFLETSAPRNLPFYERLGFTVTADVEVPEGPRTWCMTRKPGA

SEQ ID NO: 22736 - protein, 737 aa, Artificial Sequence
  Synthetic Polypeptide
MALPVTALLLPLALLLHAARPEVQLVESGGGVVQPGRSLRLSCAASGFSFSGYGMHWVRQAPGKGLEWVAYISYDGSNKYYADSVKGRFTISRDNSKNTLYLQMNSLRAEDTAVYYCAKDPAWGLRLGESSSYDFDIWGQGTMVTVSSLESGGGGSFEVQLLESGGGLIQPGGSLRLSCAASGFTFSSHAMTWVRQAPGKGLEWVSAISGSGDYTHYADSVKGRFTISRDNSKNTVYLQMNSLRAEDSAVYYCAKDEDGGSLLGHRGQGTLVTVSSTREQKLISEEDLAKPTTTPAPRPPTPAPTIASQPLSLRPEACRPAAGGAVHTRGLDFACDIYIWAPLAGTCGVLLLSLVITLYCKRGRKKLLYIFKQPFMRPVQTTQEEDGCSCRFPEEEEGGCELRVKFSRSADAPAYQQGQNQLYNELNLGRREEYDVLDKRRGRDPEMGGKPRRKNPQEGLYNELQKDKMAEAYSEIGMKGERRRGKGHDGLYQGLSTATKDTYDALHMQALPPRSSGSGEGRGSLLTCGDVEENPGPHMTEYKPTVRLATRDDVPRAVRTLAAAFADYPATRHTVDPDRHIERVTELQELFLTRVGLDIGKVWVADDGAAVAVWTTPESVEAGAVFAEIGPRMAELSGSRLAAQQQMEGLLAPHRPKEPAWFLATVGVSPDHQGKGLGSAVVLPGVEAAERAGVPAFLETSAPRNLPFYERLGFTVTADVEVPEGPRTWCMTRKPGA

SEQ ID NO: 22737 - protein, 721 aa, Artificial Sequence
  Synthetic Polypeptide
MDWIWRILFLVGAATGAHSEVQLLESGGGLVQPGGSLRLSCAASGFSFSSYALSWVRQAPGKGLEWVSSIGENDGTTDYADAVKGRFTISRDNSKNTLYLQMNSLRVEDTAVYYCVKDGVHWGQGTLVTVSSLESGGGGSFEVQLLESGGGLIQPGGSLRLSCAASGFTFSSHAMTWVRQAPGKGLEWVSAISGSGDYTHYADSVKGRFTISRDNSKNTVYLQMNSLRAEDSAVYYCAKDEDGGSLLGHRGQGTLVTVSSTREQKLISEEDLAKPTTTPAPRPPTPAPTIASQPLSLRPEACRPAAGGAVHTRGLDFACDIYIWAPLAGTCGVLLLSLVITLYCKRGRKKLLYIFKQPFMRPVQTTQEEDGCSCRFPEEEEGGCELRVKFSRSADAPAYQQGQNQLYNELNLGRREEYDVLDKRRGRDPEMGGKPRRKNPQEGLYNELQKDKMAEAYSEIGMKGERRRGKGHDGLYQGLSTATKDTYDALHMQALPPRSSGSGEGRGSLLTCGDVEENPGPHMTEYKPTVRLATRDDVPRAVRTLAAAFADYPATRHTVDPDRHIERVTELQELFLTRVGLDIGKVWVADDGAAVAVWTTPESVEAGAVFAEIGPRMAELSGSRLAAQQQMEGLLAPHRPKEPAWFLATVGVSPDHQGKGLGSAVVLPGVEAAERAGVPAFLETSAPRNLPFYERLGFTVTADVEVPEGPRTWCMTRKPGA

SEQ ID NO: 22738 - protein, 600 aa, Artificial Sequence
  Synthetic Polypeptide
MALPVTALLLPLALLLHAARPQVQLVESGGGLVQPGGSLRLSCAASGFTFTNHAMSWVRQAPGKGLELVSSISGNGRTTYYADSVKGRFTISRDISKNTLDLQMNSLRAEDTAVYYCAKDGGETLVDSRGQGTLVTVSSTREQKLISEEDLAKPTTTPAPRPPTPAPTIASQPLSLRPEACRPAAGGAVHTRGLDFACDIYIWAPLAGTCGVLLLSLVITLYCKRGRKKLLYIFKQPFMRPVQTTQEEDGCSCRFPEEEEGGCELRVKFSRSADAPAYQQGQNQLYNELNLGRREEYDVLDKRRGRDPEMGGKPRRKNPQEGLYNELQKDKMAEAYSEIGMKGERRRGKGHDGLYQGLSTATKDTYDALHMQALPPRSSGSGEGRGSLLTCGDVEENPGPHMTEYKPTVRLATRDDVPRAVRTLAAAFADYPATRHTVDPDRHIERVTELQELFLTRVGLDIGKVWVADDGAAVAVWTTPESVEAGAVFAEIGPRMAELSGSRLAAQQQMEGLLAPHRPKEPAWFLATVGVSPDHQGKGLGSAVVLPGVEAAERAGVPAFLETSAPRNLPFYERLGFTVTADVEVPEGPRTWCMTRKPGA

SEQ ID NO: 22739 - protein, 602 aa, Artificial Sequence
  Synthetic Polypeptide
MALPVTALLLPLALLLHAARPEVQLVESGGGLVQPGGSLRLSCTFSGGTFSSYTMGWFRQAPGKEREFVAEVRWGGVTTYSNSLKDRFSISEDSVKNAVYLQMNSLKPEDTAVYYCAAVRQMYMTVVPDYWGQGTLVTVSSTREQKLISEEDLAKPTTTPAPRPPTPAPTIASQPLSLRPEACRPAAGGAVHTRGLDFACDIYIWAPLAGTCGVLLLSLVITLYCKRGRKKLLYIFKQPFMRPVQTTQEEDGCSCRFPEEEEGGCELRVKFSRSADAPAYQQGQNQLYNELNLGRREEYDVLDKRRGRDPEMGGKPRRKNPQEGLYNELQKDKMAEAYSEIGMKGERRRGKGHDGLYQGLSTATKDTYDALHMQALPPRSSGSGEGRGSLLTCGDVEENPGPHMTEYKPTVRLATRDDVPRAVRTLAAAFADYPATRHTVDPDRHIERVTELQELFLTRVGLDIGKVWVADDGAAVAVWTTPESVEAGAVFAEIGPRMAELSGSRLAAQQQMEGLLAPHRPKEPAWFLATVGVSPDHQGKGLGSAVVLPGVEAAERAGVPAFLETSAPRNLPFYERLGFTVTADVEVPEGPRTWCMTRKPGA

SEQ ID NO: 22740 - protein, 609 aa, Artificial Sequence
  Synthetic Polypeptide
MALPVTALLLPLALLLHAARPEVQLVESGGGVVQPGRSLRLSCAASGFSFSGYGMHWVRQAPGKGLEWVAYISYDGSNKYYADSVKGRFTISRDNSKNTLYLQMNSLRAEDTAVYYCAKDPAWGLRLGESSSYDFDIWGQGTMVTVSSTREQKLISEEDLAKPTTTPAPRPPTPAPTIASQPLSLRPEACRPAAGGAVHTRGLDFACDIYIWAPLAGTCGVLLLSLVITLYCKRGRKKLLYIFKQPFMRPVQTTQEEDGCSCRFPEEEEGGCELRVKFSRSADAPAYQQGQNQLYNELNLGRREEYDVLDKRRGRDPEMGGKPRRKNPQEGLYNELQKDKMAEAYSEIGMKGERRRGKGHDGLYQGLSTATKDTYDALHMQALPPRSSGSGEGRGSLLTCGDVEENPGPHMTEYKPTVRLATRDDVPRAVRTLAAAFADYPATRHTVDPDRHIERVTELQELFLTRVGLDIGKVWVADDGAAVAVWTTPESVEAGAVFAEIGPRMAELSGSRLAAQQQMEGLLAPHRPKEPAWFLATVGVSPDHQGKGLGSAVVLPGVEAAERAGVPAFLETSAPRNLPFYERLGFTVTADVEVPEGPRTWCMTRKPGA

SEQ ID NO: 22741 - protein, 718 aa, Artificial Sequence
  Synthetic Polypeptide
MALPVTALLLPLALLLHAARPQLQLQESGPGLVKPSETLSLTCTVSGDSISSGDYYWGWIRQPPGKGLEWIGHIYYSGVTYYNPSLKSRVTISVDTSRNQFSLKLSSVTAADTAVYYCTREDSSNWRSRGQGTLVTVSSLESGGGGSFEEVQLLESGGGLVQPGGSLRLSCAASGFTFSSYAMSWVRQAPGKGLEWVSSISGSGDYIYYADSVKGRFTISRDISKNTLYLQMNSLRAEDTAVYYCAKEGTGANSSLADYRGQGTLVTVSSTRTTTPAPRPPTPAPTIASQPLSLRPEACRPAAGGAVHTRGLDFACDIYIWAPLAGTCGVLLLSLVITLYCKRGRKKLLYIFKQPFMRPVQTTQEEDGCSCRFPEEEEGGCELRVKFSRSADAPAYQQGQNQLYNELNLGRREEYDVLDKRRGRDPEMGGKPRRKNPQEGLYNELQKDKMAEAYSEIGMKGERRRGKGHDGLYQGLSTATKDTYDALHMQALPPRSSGSGEGRGSLLTCGDVEENPGPHMTEYKPTVRLATRDDVPRAVRTLAAAFADYPATRHTVDPDRHIERVTELQELFLTRVGLDIGKVWVADDGAAVAVWTTPESVEAGAVFAEIGPRMAELSGSRLAAQQQMEGLLAPHRPKEPAWFLATVGVSPDHQGKGLGSAVVLPGVEAAERAGVPAFLETSAPRNLPFYERLGFTVTADVEVPEGPRTWCMTRKPGA

SEQ ID NO: 22742 - protein, 601 aa, Artificial Sequence
  Synthetic Polypeptide
MALPVTALLLPLALLLHAARPEVQLVESGGGLVQPGGSLRLSCAASGFNIKDTCIGWVRRAPGKEEELVAKICKYSGHTRYADSVKGRFTISADTSKNTAYLQMNSLRAEDTAVYYCAAVSVRDGHYNYWGQGTTVTVSSTREQKLISEEDLAKPTTTPAPRPPTPAPTIASQPLSLRPEACRPAAGGAVHTRGLDFACDIYIWAPLAGTCGVLLLSLVITLYCKRGRKKLLYIFKQPFMRPVQTTQEEDGCSCRFPEEEEGGCELRVKFSRSADAPAYQQGQNQLYNELNLGRREEYDVLDKRRGRDPEMGGKPRRKNPQEGLYNELQKDKMAEAYSEIGMKGERRRGKGHDGLYQGLSTATKDTYDALHMQALPPRSSGSGEGRGSLLTCGDVEENPGPHMTEYKPTVRLATRDDVPRAVRTLAAAFADYPATRHTVDPDRHIERVTELQELFLTRVGLDIGKVWVADDGAAVAVWTTPESVEAGAVFAEIGPRMAELSGSRLAAQQQMEGLLAPHRPKEPAWFLATVGVSPDHQGKGLGSAVVLPGVEAAERAGVPAFLETSAPRNLPFYERLGFTVTADVEVPEGPRTWCMTRKPGA

SEQ ID NO: 22743 - protein, 737 aa, Artificial Sequence
  Synthetic Polypeptide
MALPVTALLLPLALLLHAARPEVQLLESGGGLVQPGGSLRLSCAASGFTFSSYAMSWVRQAPGKGLEWVSSISGSGDYIYYADSVKGRFTISRDISKNTLYLQMNSLRAEDTAVYYCAKEGTGANSSLADYRGQGTLVTVSSLESGGGGSFEQLQLQESGPGLVKPSETLALTCNVSGGSISSSSYYWGWIRQPPGKRLEWIGSIYYSGSTYFNPSLKSRVTISVDTSKNQFSLKLSSVTAADTAVYYCAGGDYYGPVGQWPSDYRGQGTLVTVSSTREQKLISEEDLAKPTTTPAPRPPTPAPTIASQPLSLRPEACRPAAGGAVHTRGLDFACDIYIWAPLAGTCGVLLLSLVITLYCKRGRKKLLYIFKQPFMRPVQTTQEEDGCSCRFPEEEEGGCELRVKFSRSADAPAYQQGQNQLYNELNLGRREEYDVLDKRRGRDPEMGGKPRRKNPQEGLYNELQKDKMAEAYSEIGMKGERRRGKGHDGLYQGLSTATKDTYDALHMQALPPRSSGSGEGRGSLLTCGDVEENPGPHMTEYKPTVRLATRDDVPRAVRTLAAAFADYPATRHTVDPDRHIERVTELQELFLTRVGLDIGKVWVADDGAAVAVWTTPESVEAGAVFAEIGPRMAELSGSRLAAQQQMEGLLAPHRPKEPAWFLATVGVSPDHQGKGLGSAVVLPGVEAAERAGVPAFLETSAPRNLPFYERLGFTVTADVEVPEGPRTWCMTRKPGA

SEQ ID NO: 22744 - protein, 731 aa, Artificial Sequence
  Synthetic Polypeptide
MALPVTALLLPLALLLHAARPQVQLVESGGGLVQPGGSLRLSCAASGFTFTNHAMSWVRQAPGKGLELVSSISGNGRTTYYADSVKGRFTISRDISKNTLDLQMNSLRAEDTAVYYCAKDGGETLVDSRGQGTLVTVSSLESGGGGSFEVQLLESGGGLVQPGGSLRLSCAASGFIFSSYAMSWVRQAPGKGQEWVSGVSGTGVNTYYADSVKGRFTISRDNSKNTLYLQMNSLRAEDTAVYYCASGKGWDSGSWYEDYRGQGTLVTVSSTREQKLISEEDLAKPTTTPAPRPPTPAPTIASQPLSLRPEACRPAAGGAVHTRGLDFACDIYIWAPLAGTCGVLLLSLVITLYCKRGRKKLLYIFKQPFMRPVQTTQEEDGCSCRFPEEEEGGCELRVKFSRSADAPAYQQGQNQLYNELNLGRREEYDVLDKRRGRDPEMGGKPRRKNPQEGLYNELQKDKMAEAYSEIGMKGERRRGKGHDGLYQGLSTATKDTYDALHMQALPPRSSGSGEGRGSLLTCGDVEENPGPHMTEYKPTVRLATRDDVPRAVRTLAAAFADYPATRHTVDPDRHIERVTELQELFLTRVGLDIGKVWVADDGAAVAVWTTPESVEAGAVFAEIGPRMAELSGSRLAAQQQMEGLLAPHRPKEPAWFLATVGVSPDHQGKGLGSAVVLPGVEAAERAGVPAFLETSAPRNLPFYERLGFTVTADVEVPEGPRTWCMTRKPGA

SEQ ID NO: 22745 - protein, 734 aa, Artificial Sequence
  Synthetic Polypeptide
MALPVTALLLPLALLLHAARPEVQLLESGGGLVQPGGSLRLSCAASGFTFSSYAMSWVRQAPGKGLEWVSSISGSGDYIYYADSVKGRFTISRDISKNTLYLQMNSLRAEDTAVYYCAKEGTGANSSLADYRGQGTLVTVSSLESGGGGSFEVQLLESGGGLVQPGGSLRLSCAASGFIFSIYAMSWVRQAPGKGLEWVSGISGSGVNTYYADSVKGRFIISRDNSRNTVYLQMNSLRADDTAVYHCANGKGWDGNTWYEDYRGQGTLVTVSSTREQKLISEEDLAKPTTTPAPRPPTPAPTIASQPLSLRPEACRPAAGGAVHTRGLDFACDIYIWAPLAGTCGVLLLSLVITLYCKRGRKKLLYIFKQPFMRPVQTTQEEDGCSCRFPEEEEGGCELRVKFSRSADAPAYQQGQNQLYNELNLGRREEYDVLDKRRGRDPEMGGKPRRKNPQEGLYNELQKDKMAEAYSEIGMKGERRRGKGHDGLYQGLSTATKDTYDALHMQALPPRSSGSGEGRGSLLTCGDVEENPGPHMTEYKPTVRLATRDDVPRAVRTLAAAFADYPATRHTVDPDRHIERVTELQELFLTRVGLDIGKVWVADDGAAVAVWTTPESVEAGAVFAEIGPRMAELSGSRLAAQQQMEGLLAPHRPKEPAWFLATVGVSPDHQGKGLGSAVVLPGVEAAERAGVPAFLETSAPRNLPFYERLGFTVTADVEVPEGPRTWCMTRKPGA

SEQ ID NO: 22746 - protein, 731 aa, Artificial Sequence
  Synthetic Polypeptide
MALPVTALLLPLALLLHAARPQVQLVESGGGLVQPGGSLRLSCAASGFTFTNHAMSWVRQAPGKGLELVSSISGNGRTTYYADSVKGRFTISRDISKNTLDLQMNSLRAEDTAVYYCAKDGGETLVDSRGQGTLVTVSSLESGGGGSFEVQLLESGGGLVQPGGSLRLSCAASGFIFSIYAMSWVRQAPGKGLEWVSGISGSGVNTYYADSVKGRFIISRDNSRNTVYLQMNSLRADDTAVYHCANGKGWDGNTWYEDYRGQGTLVTVSSTREQKLISEEDLAKPTTTPAPRPPTPAPTIASQPLSLRPEACRPAAGGAVHTRGLDFACDIYIWAPLAGTCGVLLLSLVITLYCKRGRKKLLYIFKQPFMRPVQTTQEEDGCSCRFPEEEEGGCELRVKFSRSADAPAYQQGQNQLYNELNLGRREEYDVLDKRRGRDPEMGGKPRRKNPQEGLYNELQKDKMAEAYSEIGMKGERRRGKGHDGLYQGLSTATKDTYDALHMQALPPRSSGSGEGRGSLLTCGDVEENPGPHMTEYKPTVRLATRDDVPRAVRTLAAAFADYPATRHTVDPDRHIERVTELQELFLTRVGLDIGKVWVADDGAAVAVWTTPESVEAGAVFAEIGPRMAELSGSRLAAQQQMEGLLAPHRPKEPAWFLATVGVSPDHQGKGLGSAVVLPGVEAAERAGVPAFLETSAPRNLPFYERLGFTVTADVEVPEGPRTWCMTRKPGA

SEQ ID NO: 22747 - protein, 731 aa, Artificial Sequence
  Synthetic Polypeptide
MALPVTALLLPLALLLHAARPEVQLLESGGGLVQPGGSLRLSCAASGFTFSSYAMSWVRQAPGKGLEWVSSISGSGDYIYYADSVKGRFTISRDISKNTLYLQMNSLRAEDTAVYYCAKEGTGANSSLADYRGQGTLVTVSSLESGGGGSFEVQLLESGGGLIQPGGSLRLSCAASGFTFSSHAMTWVRQAPGKGLEWVSAISGSGDYTHYADSVKGRFTISRDNSKNTVYLQMNSLRAEDSAVYYCAKDEDGGSLLGHRGQGTLVTVSSTREQKLISEEDLAKPTTTPAPRPPTPAPTIASQPLSLRPEACRPAAGGAVHTRGLDFACDIYIWAPLAGTCGVLLLSLVITLYCKRGRKKLLYIFKQPFMRPVQTTQEEDGCSCRFPEEEEGGCELRVKFSRSADAPAYQQGQNQLYNELNLGRREEYDVLDKRRGRDPEMGGKPRRKNPQEGLYNELQKDKMAEAYSEIGMKGERRRGKGHDGLYQGLSTATKDTYDALHMQALPPRSSGSGEGRGSLLTCGDVEENPGPHMTEYKPTVRLATRDDVPRAVRTLAAAFADYPATRHTVDPDRHIERVTELQELFLTRVGLDIGKVWVADDGAAVAVWTTPESVEAGAVFAEIGPRMAELSGSRLAAQQQMEGLLAPHRPKEPAWFLATVGVSPDHQGKGLGSAVVLPGVEAAERAGVPAFLETSAPRNLPFYERLGFTVTADVEVPEGPRTWCMTRKPGA

SEQ ID NO: 22748 - protein, 728 aa, Artificial Sequence
  Synthetic Polypeptide
MALPVTALLLPLALLLHAARPQLQLQESGPGLVKPSETLSLTCTVSGDSISSGDYYWGWIRQPPGKGLEWIGHIYYSGVTYYNPSLKSRVTISVDTSRNQFSLKLSSVTAADTAVYYCTREDSSNWRSRGQGTLVTVSSLESGGGGSFEQVQLVESGGGLVQPGGSLRLSCAASGFTFTNHAMSWVRQAPGKGLELVSSISGNGRTTYYADSVKGRFTISRDISKNTLDLQMNSLRAEDTAVYYCAKDGGETLVDSRGQGTLVTVSSTREQKLISEEDLAKPTTTPAPRPPTPAPTIASQPLSLRPEACRPAAGGAVHTRGLDFACDIYIWAPLAGTCGVLLLSLVITLYCKRGRKKLLYIFKQPFMRPVQTTQEEDGCSCRFPEEEEGGCELRVKFSRSADAPAYQQGQNQLYNELNLGRREEYDVLDKRRGRDPEMGGKPRRKNPQEGLYNELQKDKMAEAYSEIGMKGERRRGKGHDGLYQGLSTATKDTYDALHMQALPPRSSGSGEGRGSLLTCGDVEENPGPHMTEYKPTVRLATRDDVPRAVRTLAAAFADYPATRHTVDPDRHIERVTELQELFLTRVGLDIGKVWVADDGAAVAVWTTPESVEAGAVFAEIGPRMAELSGSRLAAQQQMEGLLAPHRPKEPAWFLATVGVSPDHQGKGLGSAVVLPGVEAAERAGVPAFLETSAPRNLPFYERLGFTVTADVEVPEGPRTWCMTRKPGA

SEQ ID NO: 22749 - protein, 728 aa, Artificial Sequence; identical to SEQ ID NO: 17446
  Synthetic Polypeptide

SEQ ID NO: 22750 - protein, 731 aa, Artificial Sequence
  Synthetic Polypeptide
MALPVTALLLPLALLLHAARPQLQLQESGPGLVKPSETLSLTCTVSGDSISSGDYYWGWIRQPPGKGLEWIGHIYYSGVTYYNPSLKSRVTISVDTSRNQFSLKLSSVTAADTAVYYCTREDSSNWRSRGQGTLVTVSSLESGGGGSFEEVQLLESGGGLVQPGGSLRLSCAASGFTFSSYAMSWVRQAPGKGLEWVSSISGSGDYIYYADSVKGRFTISRDISKNTLYLQMNSLRAEDTAVYYCAKEGTGANSSLADYRGQGTLVTVSSTREQKLISEEDLAKPTTTPAPRPPTPAPTIASQPLSLRPEACRPAAGGAVHTRGLDFACDIYIWAPLAGTCGVLLLSLVITLYCKRGRKKLLYIFKQPFMRPVQTTQEEDGCSCRFPEEEEGGCELRVKFSRSADAPAYQQGQNQLYNELNLGRREEYDVLDKRRGRDPEMGGKPRRKNPQEGLYNELQKDKMAEAYSEIGMKGERRRGKGHDGLYQGLSTATKDTYDALHMQALPPRSSGSGEGRGSLLTCGDVEENPGPHMTEYKPTVRLATRDDVPRAVRTLAAAFADYPATRHTVDPDRHIERVTELQELFLTRVGLDIGKVWVADDGAAVAVWTTPESVEAGAVFAEIGPRMAELSGSRLAAQQQMEGLLAPHRPKEPAWFLATVGVSPDHQGKGLGSAVVLPGVEAAERAGVPAFLETSAPRNLPFYERLGFTVTADVEVPEGPRTWCMTRKPGA

SEQ ID NO: 22751 - protein, 728 aa, Artificial Sequence
  Synthetic Polypeptide
MALPVTALLLPLALLLHAARPQVQLVESGGGLVQPGGSLRLSCAASGFTFTNHAMSWVRQAPGKGLELVSSISGNGRTTYYADSVKGRFTISRDISKNTLDLQMNSLRAEDTAVYYCAKDGGETLVDSRGQGTLVTVSSLESGGGGSFEVQLLESGGGLIQPGGSLRLSCAASGFTFSSHAMTWVRQAPGKGLEWVSAISGSGDYTHYADSVKGRFTISRDNSKNTVYLQMNSLRAEDSAVYYCAKDEDGGSLLGHRGQGTLVTVSSTREQKLISEEDLAKPTTTPAPRPPTPAPTIASQPLSLRPEACRPAAGGAVHTRGLDFACDIYIWAPLAGTCGVLLLSLVITLYCKRGRKKLLYIFKQPFMRPVQTTQEEDGCSCRFPEEEEGGCELRVKFSRSADAPAYQQGQNQLYNELNLGRREEYDVLDKRRGRDPEMGGKPRRKNPQEGLYNELQKDKMAEAYSEIGMKGERRRGKGHDGLYQGLSTATKDTYDALHMQALPPRSSGSGEGRGSLLTCGDVEENPGPHMTEYKPTVRLATRDDVPRAVRTLAAAFADYPATRHTVDPDRHIERVTELQELFLTRVGLDIGKVWVADDGAAVAVWTTPESVEAGAVFAEIGPRMAELSGSRLAAQQQMEGLLAPHRPKEPAWFLATVGVSPDHQGKGLGSAVVLPGVEAAERAGVPAFLETSAPRNLPFYERLGFTVTADVEVPEGPRTWCMTRKPGA

SEQ ID NO: 22752 - protein, 600 aa, Artificial Sequence; identical to SEQ ID NO: 22738
  Synthetic Polypeptide

SEQ ID NO: 22753 - protein, 602 aa, Artificial Sequence; identical to SEQ ID NO: 22739
  Synthetic Polypeptide

SEQ ID NO: 22754 - protein, 609 aa, Artificial Sequence; identical to SEQ ID NO: 22740
  Synthetic Polypeptide

SEQ ID NO: 22755 - protein, 734 aa, Artificial Sequence
  Synthetic Polypeptide
MALPVTALLLPLALLLHAARPEVQLLESGGGLVQPGGSLRLSCAASGFTFSSYAMSWVRQAPGKGLEWVSSISGSGDYIYYADSVKGRFTISRDISKNTLYLQMNSLRAEDTAVYYCAKEGTGANSSLADYRGQGTLVTVSSLESGGGGSFEVQLLESGGGLVQPGGSLRLSCAASGFIFSSYAMSWVRQAPGKGQEWVSGVSGTGVNTYYADSVKGRFTISRDNSKNTLYLQMNSLRAEDTAVYYCASGKGWDSGSWYEDYRGQGTLVTVSSTREQKLISEEDLAKPTTTPAPRPPTPAPTIASQPLSLRPEACRPAAGGAVHTRGLDFACDIYIWAPLAGTCGVLLLSLVITLYCKRGRKKLLYIFKQPFMRPVQTTQEEDGCSCRFPEEEEGGCELRVKFSRSADAPAYQQGQNQLYNELNLGRREEYDVLDKRRGRDPEMGGKPRRKNPQEGLYNELQKDKMAEAYSEIGMKGERRRGKGHDGLYQGLSTATKDTYDALHMQALPPRSSGSGEGRGSLLTCGDVEENPGPHMTEYKPTVRLATRDDVPRAVRTLAAAFADYPATRHTVDPDRHIERVTELQELFLTRVGLDIGKVWVADDGAAVAVWTTPESVEAGAVFAEIGPRMAELSGSRLAAQQQMEGLLAPHRPKEPAWFLATVGVSPDHQGKGLGSAVVLPGVEAAERAGVPAFLETSAPRNLPFYERLGFTVTADVEVPEGPRTWCMTRKPGA

SEQ ID NO: 22756 - protein, 728 aa, Artificial Sequence
  Synthetic Polypeptide
MALPVTALLLPLALLLHAARPQLQLQESGPGLVKPSETLSLTCTVSGDSISSGDYYWGWIRQPPGKGLEWIGHIYYSGVTYYNPSLKSRVTISVDTSRNQFSLKLSSVTAADTAVYYCTREDSSNWRSRGQGTLVTVSSLDSGGGGSFEQLQLQESGPGLVKPSETLSLTCTVSGGSISSGDYYWGWIRQPPGKGLEWIGHIYYSGATYYNPSLKSRVTISVDTSRNQFSLKLSSVTAADTAVYYCTRDDSSNWRSRGQGTLVTVSSTREQKLISEEDLAKPTTTPAPRPPTPAPTIASQPLSLRPEACRPAAGGAVHTRGLDFACDIYIWAPLAGTCGVLLLSLVITLYCKRGRKKLLYIFKQPFMRPVQTTQEEDGCSCRFPEEEEGGCELRVKFSRSADAPAYQQGQNQLYNELNLGRREEYDVLDKRRGRDPEMGGKPRRKNPQEGLYNELQKDKMAEAYSEIGMKGERRRGKGHDGLYQGLSTATKDTYDALHMQALPPRSSGSGEGRGSLLTCGDVEENPGPHMTEYKPTVRLATRDDVPRAVRTLAAAFADYPATRHTVDPDRHIERVTELQELFLTRVGLDIGKVWVADDGAAVAVWTTPESVEAGAVFAEIGPRMAELSGSRLAAQQQMEGLLAPHRPKEPAWFLATVGVSPDHQGKGLGSAVVLPGVEAAERAGVPAFLETSAPRNLPFYERLGFTVTADVEVPEGPRTWCMTRKPGA

SEQ ID NO: 22757 - protein, 603 aa, Artificial Sequence
  Synthetic Polypeptide
MALPVTALLLPLALLLHAARPEVQLLESGGGLVQPGGSLRLSCAASGFTFSSYAMSWVRQAPGKGLEWVSSISGSGDYIYYADSVKGRFTISRDISKNTLYLQMNSLRAEDTAVYYCAKEGTGANSSLADYRGQGTLVTVSSTREQKLISEEDLAKPTTTPAPRPPTPAPTIASQPLSLRPEACRPAAGGAVHTRGLDFACDIYIWAPLAGTCGVLLLSLVITLYCKRGRKKLLYIFKQPFMRPVQTTQEEDGCSCRFPEEEEGGCELRVKFSRSADAPAYQQGQNQLYNELNLGRREEYDVLDKRRGRDPEMGGKPRRKNPQEGLYNELQKDKMAEAYSEIGMKGERRRGKGHDGLYQGLSTATKDTYDALHMQALPPRSSGSGEGRGSLLTCGDVEENPGPHMTEYKPTVRLATRDDVPRAVRTLAAAFADYPATRHTVDPDRHIERVTELQELFLTRVGLDIGKVWVADDGAAVAVWTTPESVEAGAVFAEIGPRMAELSGSRLAAQQQMEGLLAPHRPKEPAWFLATVGVSPDHQGKGLGSAVVLPGVEAAERAGVPAFLETSAPRNLPFYERLGFTVTADVEVPEGPRTWCMTRKPGA

SEQ ID NO: 22758 - protein, 730 aa, Artificial Sequence
  Synthetic Polypeptide
MALPVTALLLPLALLLHAARPQVQLVESGGGLVQPGGSLRLSCAASGFTFTNHAMSWVRQAPGKGLELVSSISGNGRTTYYADSVKGRFTISRDISKNTLDLQMNSLRAEDTAVYYCAKDGGETLVDSRGQGTLVTVSSLESGGGGSFEVQLVESGGGVVQPGRSLRLSCAASGYTFTSYVMHWVRQAPGKGLEWIGYINPYNDGTYYADSVKGRFTISRDNSKNTLYLQMNSLRAEDTAVYYCARGTYYYGTRVFDYWGQGTMVTVSSTREQKLISEEDLAKPTTTPAPRPPTPAPTIASQPLSLRPEACRPAAGGAVHTRGLDFACDIYIWAPLAGTCGVLLLSLVITLYCKRGRKKLLYIFKQPFMRPVQTTQEEDGCSCRFPEEEEGGCELRVKFSRSADAPAYQQGQNQLYNELNLGRREEYDVLDKRRGRDPEMGGKPRRKNPQEGLYNELQKDKMAEAYSEIGMKGERRRGKGHDGLYQGLSTATKDTYDALHMQALPPRSSGSGEGRGSLLTCGDVEENPGPHMTEYKPTVRLATRDDVPRAVRTLAAAFADYPATRHTVDPDRHIERVTELQELFLTRVGLDIGKVWVADDGAAVAVWTTPESVEAGAVFAEIGPRMAELSGSRLAAQQQMEGLLAPHRPKEPAWFLATVGVSPDHQGKGLGSAVVLPGVEAAERAGVPAFLETSAPRNLPFYERLGFTVTADVEVPEGPRTWCMTRKPGA

SEQ ID NO: 22759 - protein, 600 aa, Artificial Sequence
  Synthetic Polypeptide
MALPVTALLLPLALLLHAARPEVQLVESGGGLVQPGGSLRLSCAASSFNIKDTYIGWVRRAPGKGTELVADIYCSEGSTRYADSVKGRFTISCDTSKNTAYLQMNSLRAEDTAVYYCAAVSDYVVFYYWGQGTTVTVSSTREQKLISEEDLAKPTTTPAPRPPTPAPTIASQPLSLRPEACRPAAGGAVHTRGLDFACDIYIWAPLAGTCGVLLLSLVITLYCKRGRKKLLYIFKQPFMRPVQTTQEEDGCSCRFPEEEEGGCELRVKFSRSADAPAYQQGQNQLYNELNLGRREEYDVLDKRRGRDPEMGGKPRRKNPQEGLYNELQKDKMAEAYSEIGMKGERRRGKGHDGLYQGLSTATKDTYDALHMQALPPRSSGSGEGRGSLLTCGDVEENPGPHMTEYKPTVRLATRDDVPRAVRTLAAAFADYPATRHTVDPDRHIERVTELQELFLTRVGLDIGKVWVADDGAAVAVWTTPESVEAGAVFAEIGPRMAELSGSRLAAQQQMEGLLAPHRPKEPAWFLATVGVSPDHQGKGLGSAVVLPGVEAAERAGVPAFLETSAPRNLPFYERLGFTVTADVEVPEGPRTWCMTRKPGA

SEQ ID NO: 22760 - protein, 598 aa, Artificial Sequence
  Synthetic Polypeptide
MALPVTALLLPLALLLHAARPEVQLVESGGGLVQPGGSLRLSCAASSFNIKDTYIGWVRRAPGKGTELVASIDCIYGYTRYADSVKGRFTISCDTSKNTAYLQMNSLRAEDTAVYYCAAQGYRLHYWGQGTTVTVSSTREQKLISEEDLAKPTTTPAPRPPTPAPTIASQPLSLRPEACRPAAGGAVHTRGLDFACDIYIWAPLAGTCGVLLLSLVITLYCKRGRKKLLYIFKQPFMRPVQTTQEEDGCSCRFPEEEEGGCELRVKFSRSADAPAYQQGQNQLYNELNLGRREEYDVLDKRRGRDPEMGGKPRRKNPQEGLYNELQKDKMAEAYSEIGMKGERRRGKGHDGLYQGLSTATKDTYDALHMQALPPRSSGSGEGRGSLLTCGDVEENPGPHMTEYKPTVRLATRDDVPRAVRTLAAAFADYPATRHTVDPDRHIERVTELQELFLTRVGLDIGKVWVADDGAAVAVWTTPESVEAGAVFAEIGPRMAELSGSRLAAQQQMEGLLAPHRPKEPAWFLATVGVSPDHQGKGLGSAVVLPGVEAAERAGVPAFLETSAPRNLPFYERLGFTVTADVEVPEGPRTWCMTRKPGA

SEQ ID NO: 22761 - protein, 876 aa, Artificial Sequence
  Synthetic Polypeptide
MALPVTALLLPLALLLHAARPACEVQLLESGGGLIQPGGSLRLSCAASGFTFSSHAMTWVRQAPGKGLEWVSAISGSGDYTHYADSVKGRFTISRDNSKNTVYLQMNSLRAEDSAVYYCAKDEDGGSLLGHRGQGTLVTVSSGTGGGGSGGGGSGGGGSEFINIYNAEPANPSEKNSPEFDIVMTQSPATLSLSPGERATLSCRSSKSLQNVNGNTYLYWFQQKPGQSPQLLIYRMSNLNSGVPDRFSGSGSGTEFTLTISSLEPEDFAVYYCMQHLEYPITFGAGTKLEIKGGGGSGGGGSGGGGSEVQLVESGGGLVKPGGSLKLSCAASGYTFTSYVMHWVRQAPGKGLEWIGYINPYNDGTKYNEKFQGRVTISSDKSISTAYMELSSLRSEDTAMYYCARGTYYYGTRVFDYWGQGTLVTVSSTRTTTPAPRPPTPAPTIASQPLSLRPEACRPAAGGAVHTRGLDFACDIYIWAPLAGTCGVLLLSLVITLYCKRGRKKLLYIFKQPFMRPVQTTQEEDGCSCRFPEEEEGGCELRVKFSRSADAPAYQQGQNQLYNELNLGRREEYDVLDKRRGRDPEMGGKPRRKNPQEGLYNELQKDKMAEAYSEIGMKGERRRGKGHDGLYQGLSTATKDTYDALHMQALPPRSSGSGEGRGSLLTCGDVEENPGPHMTEYKPTVRLATRDDVPRAVRTLAAAFADYPATRHTVDPDRHIERVTELQELFLTRVGLDIGKVWVADDGAAVAVWTTPESVEAGAVFAEIGPRMAELSGSRLAAQQQMEGLLAPHRPKEPAWFLATVGVSPDHQGKGLGSAVVLPGVEAAERAGVPAFLETSAPRNLPFYERLGFTVTADVEVPEGPRTWCMTRKPGA

SEQ ID NO: 22762 - protein, 853 aa, Artificial Sequence
  Synthetic Polypeptide
MALPVTALLLPLALLLHAARPACEVQLLESGGGLIQPGGSLRLSCAASGFTFSSHAMTWVRQAPGKGLEWVSAISGSGDYTHYADSVKGRFTISRDNSKNTVYLQMNSLRAEDSAVYYCAKDEDGGSLLGHRGQGTLVTVSSGTGGGGSGGGGSGGGGSEFDIQMTQSPSSLSASVGDRVTITCRASQDVNTAVAWYQQKPGKAPKLLIYSASFLYSGVPSRFSGSRSGTDFTLTISSLQPEDFATYYCQQAYTTPPTFGQGTKVEIKRTGGGGSGGGGSGGGGSEVQLVESGGGLVQPGGSLRLSCAASGFNIKDTYIHWVRQAPGKGLEWVARIYPTNGYTRYADSVKGRFTISADTSKNTAYLQMNSLRAEDTAVYYCSRWGGAGAYAMDVWGQGTLVTVSSTRTTTPAPRPPTPAPTIASQPLSLRPEACRPAAGGAVHTRGLDFACDIYIWAPLAGTCGVLLLSLVITLYCKRGRKKLLYIFKQPFMRPVQTTQEEDGCSCRFPEEEEGGCELRVKFSRSADAPAYQQGQNQLYNELNLGRREEYDVLDKRRGRDPEMGGKPRRKNPQEGLYNELQKDKMAEAYSEIGMKGERRRGKGHDGLYQGLSTATKDTYDALHMQALPPRSSGSGEGRGSLLTCGDVEENPGPHMTEYKPTVRLATRDDVPRAVRTLAAAFADYPATRHTVDPDRHIERVTELQELFLTRVGLDIGKVWVADDGAAVAVWTTPESVEAGAVFAEIGPRMAELSGSRLAAQQQMEGLLAPHRPKEPAWFLATVGVSPDHQGKGLGSAVVLPGVEAAERAGVPAFLETSAPRNLPFYERLGFTVTADVEVPEGPRTWCMTRKPGA

SEQ ID NO: 22763 - protein, 9 aa, Artificial Sequence
  Synthetic Polypeptide
GGGGGGGGG

SEQ ID NO: 22764 - protein, 663 aa, Artificial Sequence
  Synthetic Polypeptide
MALPVTALLLPLALLLHAARPQLQLQESGPGLVKPSETLSLTCTVSGDSISSGDYYWGWIRQPPGKGLEWIGHIYYSGVTYYNPSLKSRVTISVDTSRNQFSLKLSSVTAADTAVYYCTREDSSNWRSRGQGTLVTVSSLDSGGGGSFEQLQLQESGPGLVKPSETLSLTCTVSGGSISSGDYYWGWIRQPPGKGLEWIGHIYYSGATYYNPSLKSRVTISVDTSRNQFSLKLSSVTAADTAVYYCTRDDSSNWRSRGQGTLVTVSSTRGSGGGGSGGGGSGFKIPIEELEDRVFVNCNTSITWVEGTVGTLLSDITRLDLGKRILDPRGIYRCNGTDIYKDKESTVQVHYRMCQSCVELDPATVAGIIVTDVIATLLLALGVFCFAGHETGRLSGAADTQALLRNDQVYQPLRDRDDAQYSHLGGNWARNKRAKRSGSGQCTNYALLKLAGDVESNPGPSRDHMTEYKPTVRLATRDDVPRAVRTLAAAFADYPATRHTVDPDRHIERVTELQELFLTRVGLDIGKVWVADDGAAVAVWTTPESVEAGAVFAEIGPRMAELSGSRLAAQQQMEGLLAPHRPKEPAWFLATVGVSPDHQGKGLGSAVVLPGVEAAERAGVPAFLETSAPRNLPFYERLGFTVTADVEVPEGPRTWCMTRKPGA

SEQ ID NO: 22765 - protein, 666 aa, Artificial Sequence
  Synthetic Polypeptide
MALPVTALLLPLALLLHAARPQLQLQESGPGLVKPSETLSLTCTVSGDSISSGDYYWGWIRQPPGKGLEWIGHIYYSGVTYYNPSLKSRVTISVDTSRNQFSLKLSSVTAADTAVYYCTREDSSNWRSRGQGTLVTVSSLESGGGGSFEEVQLLESGGGLVQPGGSLRLSCAASGFTFSSYAMSWVRQAPGKGLEWVSSISGSGDYIYYADSVKGRFTISRDISKNTLYLQMNSLRAEDTAVYYCAKEGTGANSSLADYRGQGTLVTVSSTRGSGGGGSGGGGSGFKIPIEELEDRVFVNCNTSITWVEGTVGTLLSDITRLDLGKRILDPRGIYRCNGTDIYKDKESTVQVHYRMCQSCVELDPATVAGIIVTDVIATLLLALGVFCFAGHETGRLSGAADTQALLRNDQVYQPLRDRDDAQYSHLGGNWARNKRAKRSGSGQCTNYALLKLAGDVESNPGPSRDHMTEYKPTVRLATRDDVPRAVRTLAAAFADYPATRHTVDPDRHIERVTELQELFLTRVGLDIGKVWVADDGAAVAVWTTPESVEAGAVFAEIGPRMAELSGSRLAAQQQMEGLLAPHRPKEPAWFLATVGVSPDHQGKGLGSAVVLPGVEAAERAGVPAFLETSAPRNLPFYERLGFTVTADVEVPEGPRTWCMTRKPGA

SEQ ID NO: 22766 - protein, 536 aa, Artificial Sequence
  Synthetic Polypeptide
MALPVTALLLPLALLLHAARPEVQLVESGGGLVQPGGSLRLSCAASGFNIKDTCIGWVRRAPGKEEELVAKICKYSGHTRYADSVKGRFTISADTSKNTAYLQMNSLRAEDTAVYYCAAVSVRDGHYNYWGQGTTVTVSSTRGSGGGGSGGGGSGFKIPIEELEDRVFVNCNTSITWVEGTVGTLLSDITRLDLGKRILDPRGIYRCNGTDIYKDKESTVQVHYRMCQSCVELDPATVAGIIVTDVIATLLLALGVFCFAGHETGRLSGAADTQALLRNDQVYQPLRDRDDAQYSHLGGNWARNKRAKRSGSGQCTNYALLKLAGDVESNPGPSRDHMTEYKPTVRLATRDDVPRAVRTLAAAFADYPATRHTVDPDRHIERVTELQELFLTRVGLDIGKVWVADDGAAVAVWTTPESVEAGAVFAEIGPRMAELSGSRLAAQQQMEGLLAPHRPKEPAWFLATVGVSPDHQGKGLGSAVVLPGVEAAERAGVPAFLETSAPRNLPFYERLGFTVTADVEVPEGPRTWCMTRKPGA

SEQ ID NO: 22767 - protein, 698 aa, Artificial Sequence
  Synthetic Polypeptide
MALPVTALLLPLALLLHAARPQLQLQESGPGLVKPSETLSLTCTVSGDSISSGDYYWGWIRQPPGKGLEWIGHIYYSGVTYYNPSLKSRVTISVDTSRNQFSLKLSSVTAADTAVYYCTREDSSNWRSRGQGTLVTVSSLDSGGGGSFEQLQLQESGPGLVKPSETLSLTCTVSGGSISSGDYYWGWIRQPPGKGLEWIGHIYYSGATYYNPSLKSRVTISVDTSRNQFSLKLSSVTAADTAVYYCTRDDSSNWRSRGQGTLVTVSSTRGSGGGGSGGGGSGDGNEEMGGITQTPYKVSISGTTVILTCPQYPGSEILWQHNDKNIGGDEDDKNIGSDEDHLSLKEFSELEQSGYYVCYPRGSKPEDANFYLYLRARVCENCMEMDVMSVATIVIVDICITGGLLLLVYYWSKNRKAKAKPVTRGAGAGGRQRGQNKERPPPVPNPDYEPIRKGQRDLYSGLNQRRIRAKRSGSGQCTNYALLKLAGDVESNPGPSRDHMTEYKPTVRLATRDDVPRAVRTLAAAFADYPATRHTVDPDRHIERVTELQELFLTRVGLDIGKVWVADDGAAVAVWTTPESVEAGAVFAEIGPRMAELSGSRLAAQQQMEGLLAPHRPKEPAWFLATVGVSPDHQGKGLGSAVVLPGVEAAERAGVPAFLETSAPRNLPFYERLGFTVTADVEVPEGPRTWCMTRKPGA

SEQ ID NO: 22768 - protein, 701 aa, Artificial Sequence
  Synthetic Polypeptide
MALPVTALLLPLALLLHAARPQLQLQESGPGLVKPSETLSLTCTVSGDSISSGDYYWGWIRQPPGKGLEWIGHIYYSGVTYYNPSLKSRVTISVDTSRNQFSLKLSSVTAADTAVYYCTREDSSNWRSRGQGTLVTVSSLESGGGGSFEEVQLLESGGGLVQPGGSLRLSCAASGFTFSSYAMSWVRQAPGKGLEWVSSISGSGDYIYYADSVKGRFTISRDISKNTLYLQMNSLRAEDTAVYYCAKEGTGANSSLADYRGQGTLVTVSSTRGSGGGGSGGGGSGDGNEEMGGITQTPYKVSISGTTVILTCPQYPGSEILWQHNDKNIGGDEDDKNIGSDEDHLSLKEFSELEQSGYYVCYPRGSKPEDANFYLYLRARVCENCMEMDVMSVATIVIVDICITGGLLLLVYYWSKNRKAKAKPVTRGAGAGGRQRGQNKERPPPVPNPDYEPIRKGQRDLYSGLNQRRIRAKRSGSGQCTNYALLKLAGDVESNPGPSRDHMTEYKPTVRLATRDDVPRAVRTLAAAFADYPATRHTVDPDRHIERVTELQELFLTRVGLDIGKVWVADDGAAVAVWTTPESVEAGAVFAEIGPRMAELSGSRLAAQQQMEGLLAPHRPKEPAWFLATVGVSPDHQGKGLGSAVVLPGVEAAERAGVPAFLETSAPRNLPFYERLGFTVTADVEVPEGPRTWCMTRKPGA

SEQ ID NO: 22769 - protein, 663 aa, Artificial Sequence
  Synthetic Polypeptide
MALPVTALLLPLALLLHAARPQLQLQESGPGLVKPSETLSLTCTVSGDSISSGDYYWGWIRQPPGKGLEWIGHIYYSGVTYYNPSLKSRVTISVDTSRNQFSLKLSSVTAADTAVYYCTREDSSNWRSRGQGTLVTVSSLESGGGGSFEQLQLQESGPGLVKPSETLSLTCTVSGGSISSGDYYWGWIRQPPGKGLEWIGHIYYSGATYYNPSLKSRVTISVDTSRNQFSLKLSSVTAADTAVYYCTRDDSSNWRSRGQGTLVTVSSTRGSGGGGSGGGGSGFKIPIEELEDRVFVNCNTSITWVEGTVGTLLSDITRLDLGKRILDPRGIYRCNGTDIYKDKESTVQVHYRMCQSCVELDPATVAGIIVTDVIATLLLALGVFCFAGHETGRLSGAADTQALLRNDQVYQPLRDRDDAQYSHLGGNWARNKRAKRSGSGQCTNYALLKLAGDVESNPGPSRDHMTEYKPTVRLATRDDVPRAVRTLAAAFADYPATRHTVDPDRHIERVTELQELFLTRVGLDIGKVWVADDGAAVAVWTTPESVEAGAVFAEIGPRMAELSGSRLAAQQQMEGLLAPHRPKEPAWFLATVGVSPDHQGKGLGSAVVLPGVEAAERAGVPAFLETSAPRNLPFYERLGFTVTADVEVPEGPRTWCMTRKPGA

SEQ ID NO: 22770 - protein, 663 aa, Artificial Sequence
  Synthetic Polypeptide
MALPVTALLLPLALLLHAARPQLQLQESGPGLVKPSETLSLTCTVSGDSISSGDYYWGWIRQPPGKGLEWIGHIYYSGVTYYNPSLKSRVTISVDTSRNQFSLKLSSVTAADTAVYYCTREDSSNWRSRGQGTLVTVSSLESGGGGSFEQVQLVESGGGLVQPGGSLRLSCAASGFTFTNHAMSWVRQAPGKGLELVSSISGNGRTTYYADSVKGRFTISRDISKNTLDLQMNSLRAEDTAVYYCAKDGGETLVDSRGQGTLVTVSSTRGSGGGGSGGGGSGFKIPIEELEDRVFVNCNTSITWVEGTVGTLLSDITRLDLGKRILDPRGIYRCNGTDIYKDKESTVQVHYRMCQSCVELDPATVAGIIVTDVIATLLLALGVFCFAGHETGRLSGAADTQALLRNDQVYQPLRDRDDAQYSHLGGNWARNKRAKRSGSGQCTNYALLKLAGDVESNPGPSRDHMTEYKPTVRLATRDDVPRAVRTLAAAFADYPATRHTVDPDRHIERVTELQELFLTRVGLDIGKVWVADDGAAVAVWTTPESVEAGAVFAEIGPRMAELSGSRLAAQQQMEGLLAPHRPKEPAWFLATVGVSPDHQGKGLGSAVVLPGVEAAERAGVPAFLETSAPRNLPFYERLGFTVTADVEVPEGPRTWCMTRKPGA

SEQ ID NO: 22771 - protein, 571 aa, Artificial Sequence
  Synthetic Polypeptide
MALPVTALLLPLALLLHAARPEVQLVESGGGLVQPGGSLRLSCAASGFNIKDTCIGWVRRAPGKEEELVAKICKYSGHTRYADSVKGRFTISADTSKNTAYLQMNSLRAEDTAVYYCAAVSVRDGHYNYWGQGTTVTVSSTRGSGGGGSGGGGSGDGNEEMGGITQTPYKVSISGTTVILTCPQYPGSEILWQHNDKNIGGDEDDKNIGSDEDHLSLKEFSELEQSGYYVCYPRGSKPEDANFYLYLRARVCENCMEMDVMSVATIVIVDICITGGLLLLVYYWSKNRKAKAKPVTRGAGAGGRQRGQNKERPPPVPNPDYEPIRKGQRDLYSGLNQRRIRAKRSGSGQCTNYALLKLAGDVESNPGPSRDHMTEYKPTVRLATRDDVPRAVRTLAAAFADYPATRHTVDPDRHIERVTELQELFLTRVGLDIGKVWVADDGAAVAVWTTPESVEAGAVFAEIGPRMAELSGSRLAAQQQMEGLLAPHRPKEPAWFLATVGVSPDHQGKGLGSAVVLPGVEAAERAGVPAFLETSAPRNLPFYERLGFTVTADVEVPEGPRTWCMTRKPGA

SEQ ID NO: 22772 - protein, 698 aa, Artificial Sequence
  Synthetic Polypeptide
MALPVTALLLPLALLLHAARPQLQLQESGPGLVKPSETLSLTCTVSGDSISSGDYYWGWIRQPPGKGLEWIGHIYYSGVTYYNPSLKSRVTISVDTSRNQFSLKLSSVTAADTAVYYCTREDSSNWRSRGQGTLVTVSSLESGGGGSFEQLQLQESGPGLVKPSETLSLTCTVSGGSISSGDYYWGWIRQPPGKGLEWIGHIYYSGATYYNPSLKSRVTISVDTSRNQFSLKLSSVTAADTAVYYCTRDDSSNWRSRGQGTLVTVSSTRGSGGGGSGGGGSGDGNEEMGGITQTPYKVSISGTTVILTCPQYPGSEILWQHNDKNIGGDEDDKNIGSDEDHLSLKEFSELEQSGYYVCYPRGSKPEDANFYLYLRARVCENCMEMDVMSVATIVIVDICITGGLLLLVYYWSKNRKAKAKPVTRGAGAGGRQRGQNKERPPPVPNPDYEPIRKGQRDLYSGLNQRRIRAKRSGSGQCTNYALLKLAGDVESNPGPSRDHMTEYKPTVRLATRDDVPRAVRTLAAAFADYPATRHTVDPDRHIERVTELQELFLTRVGLDIGKVWVADDGAAVAVWTTPESVEAGAVFAEIGPRMAELSGSRLAAQQQMEGLLAPHRPKEPAWFLATVGVSPDHQGKGLGSAVVLPGVEAAERAGVPAFLETSAPRNLPFYERLGFTVTADVEVPEGPRTWCMTRKPGA

SEQ ID NO: 22773 - protein, 698 aa, Artificial Sequence
  Synthetic Polypeptide
MALPVTALLLPLALLLHAARPQLQLQESGPGLVKPSETLSLTCTVSGDSISSGDYYWGWIRQPPGKGLEWIGHIYYSGVTYYNPSLKSRVTISVDTSRNQFSLKLSSVTAADTAVYYCTREDSSNWRSRGQGTLVTVSSLESGGGGSFEQVQLVESGGGLVQPGGSLRLSCAASGFTFTNHAMSWVRQAPGKGLELVSSISGNGRTTYYADSVKGRFTISRDISKNTLDLQMNSLRAEDTAVYYCAKDGGETLVDSRGQGTLVTVSSTRGSGGGGSGGGGSGDGNEEMGGITQTPYKVSISGTTVILTCPQYPGSEILWQHNDKNIGGDEDDKNIGSDEDHLSLKEFSELEQSGYYVCYPRGSKPEDANFYLYLRARVCENCMEMDVMSVATIVIVDICITGGLLLLVYYWSKNRKAKAKPVTRGAGAGGRQRGQNKERPPPVPNPDYEPIRKGQRDLYSGLNQRRIRAKRSGSGQCTNYALLKLAGDVESNPGPSRDHMTEYKPTVRLATRDDVPRAVRTLAAAFADYPATRHTVDPDRHIERVTELQELFLTRVGLDIGKVWVADDGAAVAVWTTPESVEAGAVFAEIGPRMAELSGSRLAAQQQMEGLLAPHRPKEPAWFLATVGVSPDHQGKGLGSAVVLPGVEAAERAGVPAFLETSAPRNLPFYERLGFTVTADVEVPEGPRTWCMTRKPGA

SEQ ID NO: 22774 - protein, 701 aa, Artificial Sequence
  Synthetic Polypeptide
MALPVTALLLPLALLLHAARPQVQLVESGGGLVQPGGSLRLSCAASGFTFTNHAMSWVRQAPGKGLELVSSISGNGRTTYYADSVKGRFTISRDISKNTLDLQMNSLRAEDTAVYYCAKDGGETLVDSRGQGTLVTVSSLESGGGGSFEVQLLESGGGLVQPGGSLRLSCAASGFIFSSYAMSWVRQAPGKGQEWVSGVSGTGVNTYYADSVKGRFTISRDNSKNTLYLQMNSLRAEDTAVYYCASGKGWDSGSWYEDYRGQGTLVTVSSTRGSGGGGSGGGGSGDGNEEMGGITQTPYKVSISGTTVILTCPQYPGSEILWQHNDKNIGGDEDDKNIGSDEDHLSLKEFSELEQSGYYVCYPRGSKPEDANFYLYLRARVCENCMEMDVMSVATIVIVDICITGGLLLLVYYWSKNRKAKAKPVTRGAGAGGRQRGQNKERPPPVPNPDYEPIRKGQRDLYSGLNQRRIRAKRSGSGQCTNYALLKLAGDVESNPGPSRDHMTEYKPTVRLATRDDVPRAVRTLAAAFADYPATRHTVDPDRHIERVTELQELFLTRVGLDIGKVWVADDGAAVAVWTTPESVEAGAVFAEIGPRMAELSGSRLAAQQQMEGLLAPHRPKEPAWFLATVGVSPDHQGKGLGSAVVLPGVEAAERAGVPAFLETSAPRNLPFYERLGFTVTADVEVPEGPRTWCMTRKPGA

SEQ ID NO: 22775 - protein, 704 aa, Artificial Sequence
  Synthetic Polypeptide
MALPVTALLLPLALLLHAARPEVQLLESGGGLVQPGGSLRLSCAASGFTFSSYAMSWVRQAPGKGLEWVSSISGSGDYIYYADSVKGRFTISRDISKNTLYLQMNSLRAEDTAVYYCAKEGTGANSSLADYRGQGTLVTVSSLESGGGGSFEVQLLESGGGLVQPGGSLRLSCAASGFIFSIYAMSWVRQAPGKGLEWVSGISGSGVNTYYADSVKGRFIISRDNSRNTVYLQMNSLRADDTAVYHCANGKGWDGNTWYEDYRGQGTLVTVSSTRGSGGGGSGGGGSGDGNEEMGGITQTPYKVSISGTTVILTCPQYPGSEILWQHNDKNIGGDEDDKNIGSDEDHLSLKEFSELEQSGYYVCYPRGSKPEDANFYLYLRARVCENCMEMDVMSVATIVIVDICITGGLLLLVYYWSKNRKAKAKPVTRGAGAGGRQRGQNKERPPPVPNPDYEPIRKGQRDLYSGLNQRRIRAKRSGSGQCTNYALLKLAGDVESNPGPSRDHMTEYKPTVRLATRDDVPRAVRTLAAAFADYPATRHTVDPDRHIERVTELQELFLTRVGLDIGKVWVADDGAAVAVWTTPESVEAGAVFAEIGPRMAELSGSRLAAQQQMEGLLAPHRPKEPAWFLATVGVSPDHQGKGLGSAVVLPGVEAAERAGVPAFLETSAPRNLPFYERLGFTVTADVEVPEGPRTWCMTRKPGA

SEQ ID NO: 22776 - protein, 701 aa, Artificial Sequence
  Synthetic Polypeptide
MALPVTALLLPLALLLHAARPQVQLVESGGGLVQPGGSLRLSCAASGFTFTNHAMSWVRQAPGKGLELVSSISGNGRTTYYADSVKGRFTISRDISKNTLDLQMNSLRAEDTAVYYCAKDGGETLVDSRGQGTLVTVSSLESGGGGSFEVQLLESGGGLVQPGGSLRLSCAASGFIFSIYAMSWVRQAPGKGLEWVSGISGSGVNTYYADSVKGRFIISRDNSRNTVYLQMNSLRADDTAVYHCANGKGWDGNTWYEDYRGQGTLVTVSSTRGSGGGGSGGGGSGDGNEEMGGITQTPYKVSISGTTVILTCPQYPGSEILWQHNDKNIGGDEDDKNIGSDEDHLSLKEFSELEQSGYYVCYPRGSKPEDANFYLYLRARVCENCMEMDVMSVATIVIVDICITGGLLLLVYYWSKNRKAKAKPVTRGAGAGGRQRGQNKERPPPVPNPDYEPIRKGQRDLYSGLNQRRIRAKRSGSGQCTNYALLKLAGDVESNPGPSRDHMTEYKPTVRLATRDDVPRAVRTLAAAFADYPATRHTVDPDRHIERVTELQELFLTRVGLDIGKVWVADDGAAVAVWTTPESVEAGAVFAEIGPRMAELSGSRLAAQQQMEGLLAPHRPKEPAWFLATVGVSPDHQGKGLGSAVVLPGVEAAERAGVPAFLETSAPRNLPFYERLGFTVTADVEVPEGPRTWCMTRKPGA

SEQ ID NO: 22777 - protein, 704 aa, Artificial Sequence
  Synthetic Polypeptide
MALPVTALLLPLALLLHAARPEVQLLESGGGLVQPGGSLRLSCAASGFTFSSYAMSWVRQAPGKGLEWVSSISGSGDYIYYADSVKGRFTISRDISKNTLYLQMNSLRAEDTAVYYCAKEGTGANSSLADYRGQGTLVTVSSLESGGGGSFEVQLLESGGGLVQPGGSLRLSCAASGFIFSSYAMSWVRQAPGKGQEWVSGVSGTGVNTYYADSVKGRFTISRDNSKNTLYLQMNSLRAEDTAVYYCASGKGWDSGSWYEDYRGQGTLVTVSSTRGSGGGGSGGGGSGDGNEEMGGITQTPYKVSISGTTVILTCPQYPGSEILWQHNDKNIGGDEDDKNIGSDEDHLSLKEFSELEQSGYYVCYPRGSKPEDANFYLYLRARVCENCMEMDVMSVATIVIVDICITGGLLLLVYYWSKNRKAKAKPVTRGAGAGGRQRGQNKERPPPVPNPDYEPIRKGQRDLYSGLNQRRIRAKRSGSGQCTNYALLKLAGDVESNPGPSRDHMTEYKPTVRLATRDDVPRAVRTLAAAFADYPATRHTVDPDRHIERVTELQELFLTRVGLDIGKVWVADDGAAVAVWTTPESVEAGAVFAEIGPRMAELSGSRLAAQQQMEGLLAPHRPKEPAWFLATVGVSPDHQGKGLGSAVVLPGVEAAERAGVPAFLETSAPRNLPFYERLGFTVTADVEVPEGPRTWCMTRKPGA

SEQ ID NO: 22778 - protein, 698 aa, Artificial Sequence
  Synthetic Polypeptide
MALPVTALLLPLALLLHAARPEVQLVESGGGLVQPGGSLRLSCTFSGGTFSSYTMGWFRQAPGKEREFVAEVRWGGVTTYSNSLKDRFSISEDSVKNAVYLQMNSLKPEDTAVYYCAAVRQMYMTVVPDYWGQGTLVTVSSSGGGGSFEQLQLQESGPGLVKPSETLSLTCTVSGGSISSGDYYWGWIRQPPGKGLEWIGHIYYSGATYYNPSLKSRVTISVDTSRNQFSLKLSSVTAADTAVYYCTRDDSSNWRSRGQGTLVTVSSTRGSGGGGSGGGGSGDGNEEMGGITQTPYKVSISGTTVILTCPQYPGSEILWQHNDKNIGGDEDDKNIGSDEDHLSLKEFSELEQSGYYVCYPRGSKPEDANFYLYLRARVCENCMEMDVMSVATIVIVDICITGGLLLLVYYWSKNRKAKAKPVTRGAGAGGRQRGQNKERPPPVPNPDYEPIRKGQRDLYSGLNQRRIRAKRSGSGQCTNYALLKLAGDVESNPGPSRDHMTEYKPTVRLATRDDVPRAVRTLAAAFADYPATRHTVDPDRHIERVTELQELFLTRVGLDIGKVWVADDGAAVAVWTTPESVEAGAVFAEIGPRMAELSGSRLAAQQQMEGLLAPHRPKEPAWFLATVGVSPDHQGKGLGSAVVLPGVEAAERAGVPAFLETSAPRNLPFYERLGFTVTADVEVPEGPRTWCMTRKPGA

SEQ ID NO: 22779 - skipped

SEQ ID NO: 22780 - protein, 501 aa, Artificial Sequence
  Synthetic Polypeptide
MALPVTALLLPLALLLHAARPDIQMTQTTSSLSASLGDRVTISCRASQDISKYLNWYQQKPDGTVKLLIYHTSRLHSGVPSRFSGSGSGTDYSLTISNLEQEDIATYFCQQGNTLPYTFGGGTKLEITGGGGSGGGGSGGGGSEVKLQESGPGLVAPSQSLSVTCTVSGVSLPDYGVSWIRQPPRKGLEWLGVIWGSETTYYNSALKSRLTIIKDNSKSQVFLKMNSLQTDDTAIYYCAKHYYYGGSYAMDYWGQGTSVTVSSRVEQKLISEEDLAKPTTTPAPRPPTPAPTIASQPLSLRPEACRPAAGGAVHTRGLDFACDIYIWAPLAGTCGVLLLSLVITLYCKRGRKKLLYIFKQPFMRPVQTTQEEDGCSCRFPEEEEGGCELRVKFSRSADAPAYQQGQNQLYNELNLGRREEYDVLDKRRGRDPEMGGKPRRKNPQEGLYNELQKDKMAEAYSEIGMKGERRRGKGHDGLYQGLSTATKDTYDALHMQALPPR

SEQ ID NO: 22781 - protein, 492 aa, Artificial Sequence
  Synthetic Polypeptide
MALPVTALLLPLALLLHAARPDIQMTQSPSSLSASVGDRVTITCKASDHINNWLAWYQQKPGQAPKLLIYGATTLETGVPSRFSGSGSGTDYTLTISSLQPEDFATYYCQQSWNTPWTFGQGTKLEIKRGGGGSGGGGSGGGGSQVQLQQPGAELVKPGASVKMSCKASGYAFSSYWINWMKQKPGQGLEWIGQIYPGDGDTNYNGKFKGRATLTADTSSSTAYMQLSSLTSEDSAVYFCARSITTVVGCAMDYWGQGTSVTVSSTRTTTPAPRPPTPAPTIASQPLSLRPEACRPAAGGAVHTRGLDFACDIYIWAPLAGTCGVLLLSLVITLYCKRGRKKLLYIFKQPFMRPVQTTQEEDGCSCRFPEEEEGGCELRVKFSRSADAPAYQQGQNQLYNELNLGRREEYDVLDKRRGRDPEMGGKPRRKNPQEGLYNELQKDKMAEAYSEIGMKGERRRGKGHDGLYQGLSTATKDTYDALHMQALPPRVD

SEQ ID NO: 22782 - protein, 732 aa, Artificial Sequence; identical to SEQ ID NO: 19755
  Synthetic Polypeptide

SEQ ID NO: 22783 - protein, 728 aa, Artificial Sequence; identical to SEQ ID NO: 19686
  Synthetic Polypeptide

SEQ ID NO: 22784 - protein, 603 aa, Artificial Sequence
  Synthetic Polypeptide
MALPVTALLLPLALLLHAARPFEQVKLEESGGGLVQPGESLRLSCSASGSIFKVFRVFAMSWYRQGPGKQRELVASISSGETTTYAESVKGRFTISRDNAKNTAYLQMDSLKPEDTAVYYCNADHTFTGDFWGQGTQVTVSSTREQKLISEEDLAKPTTTPAPRPPTPAPTIASQPLSLRPEACRPAAGGAVHTRGLDFACDIYIWAPLAGTCGVLLLSLVITLYCKRGRKKLLYIFKQPFMRPVQTTQEEDGCSCRFPEEEEGGCELRVKFSRSADAPAYQQGQNQLYNELNLGRREEYDVLDKRRGRDPEMGGKPRRKNPQEGLYNELQKDKMAEAYSEIGMKGERRRGKGHDGLYQGLSTATKDTYDALHMQALPPRSSGSGEGRGSLLTCGDVEENPGPHMTEYKPTVRLATRDDVPRAVRTLAAAFADYPATRHTVDPDRHIERVTELQELFLTRVGLDIGKVWVADDGAAVAVWTTPESVEAGAVFAEIGPRMAELSGSRLAAQQQMEGLLAPHRPKEPAWFLATVGVSPDHQGKGLGSAVVLPGVEAAERAGVPAFLETSAPRNLPFYERLGFTVTADVEVPEGPRTWCMTRKPGA

SEQ ID NO: 22785 - protein, 711 aa, Artificial Sequence
  Synthetic Polypeptide
MALPVTALLLPLALLLHAARPEIVLTQSPATLSLSPGERATLSCRASQSVSSSLAWYQQKPGQAPRLLIYDASNRATGIPARFSGSGSGTDFTLTISSLEPEDFAVYYCQQRSNWPPYTFGQGTKVEIKRGGGGSGGGGSGGGGSQVQLVESGGGVVQPGRSLRLSCAASGFTFSSYGIHWVRQAPGKGLEWVAVIGYDGSDKNYADSVKGRFTIFRDNSKNTLYLQMNSLRAEDTAVYYCARDQLGDAFDIWGQGTMVTVSSTRTTTPAPRPPTPAPTIASQPLSLRPEACRPAAGGAVHTRGLDFACDIYIWAPLAGTCGVLLLSLVITLYCKRGRKKLLYIFKQPFMRPVQTTQEEDGCSCRFPEEEEGGCELRVKFSRSADAPAYQQGQNQLYNELNLGRREEYDVLDKRRGRDPEMGGKPRRKNPQEGLYNELQKDKMAEAYSEIGMKGERRRGKGHDGLYQGLSTATKDTYDALHMQALPPRSSGSGEGRGSLLTCGDVEENPGPHMTEYKPTVRLATRDDVPRAVRTLAAAFADYPATRHTVDPDRHIERVTELQELFLTRVGLDIGKVWVADDGAAVAVWTTPESVEAGAVFAEIGPRMAELSGSRLAAQQQMEGLLAPHRPKEPAWFLATVGVSPDHQGKGLGSAVVLPGVEAAERAGVPAFLETSAPRNLPFYERLGFTVTADVEVPEGPRTWCMTRKPGA

SEQ ID NO: 22786 - protein, 712 aa, Artificial Sequence
  Synthetic Polypeptide
MALPVTALLLPLALLLHAARPDILLTQSPAILSVSPGERVSFSCRTSQSIGTNIHWYQQRTNGFPRLLIKNVSESISGIPSRFSGSGSGTDFILSINSVESEDIADYYCQQSNTWPFTFGGGTKLEIKGGGGSGGGGSGGGGSQVQLQQPVTELVRPGASVMLSCKASDYPFTNYWIHWVKQRPGQGLEWIGVIDPSDTYPNYNKKFKGKATLTVVVSSSTAYMQLSSLTSDDSAVYYCARNGDSDYYSGMDYWGQGTSVTVSSTRTTTPAPRPPTPAPTIASQPLSLRPEACRPAAGGAVHTRGLDFACDIYIWAPLAGTCGVLLLSLVITLYCKRGRKKLLYIFKQPFMRPVQTTQEEDGCSCRFPEEEEGGCELRVKFSRSADAPAYQQGQNQLYNELNLGRREEYDVLDKRRGRDPEMGGKPRRKNPQEGLYNELQKDKMAEAYSEIGMKGERRRGKGHDGLYQGLSTATKDTYDALHMQALPPRSSGSGEGRGSLLTCGDVEENPGPHMTEYKPTVRLATRDDVPRAVRTLAAAFADYPATRHTVDPDRHIERVTELQELFLTRVGLDIGKVWVADDGAAVAVWTTPESVEAGAVFAEIGPRMAELSGSRLAAQQQMEGLLAPHRPKEPAWFLATVGVSPDHQGKGLGSAVVLPGVEAAERAGVPAFLETSAPRNLPFYERLGFTVTADVEVPEGPRTWCMTRKPGA

SEQ ID NO: 22787 - protein, 712 aa, Artificial Sequence
  Synthetic Polypeptide
MALPVTALLLPLALLLHAARPEIVLTQSPATLSLSPGERATLSCRASQSVTSYLAWYQQKPGQAPRLLIYDASNRATGIPARFSGSGSRTDFTLTISSLEPEDFAVYYCQQRSNWPHLTFGGGTKVEIKRGGGGSGGGGSGGGGSQVQLVESGGGVVQPGRSLRLSCAASGFTFSTYGMHWVRQAPGKGLEWVAVISHDGSDKYYADSVKGRFTISRDNSKNTLYLQMNSLRAEDTAVYYCARDQSIIETFDYWGQGTLVTVSSTRTTTPAPRPPTPAPTIASQPLSLRPEACRPAAGGAVHTRGLDFACDIYIWAPLAGTCGVLLLSLVITLYCKRGRKKLLYIFKQPFMRPVQTTQEEDGCSCRFPEEEEGGCELRVKFSRSADAPAYQQGQNQLYNELNLGRREEYDVLDKRRGRDPEMGGKPRRKNPQEGLYNELQKDKMAEAYSEIGMKGERRRGKGHDGLYQGLSTATKDTYDALHMQALPPRSSGSGEGRGSLLTCGDVEENPGPHMTEYKPTVRLATRDDVPRAVRTLAAAFADYPATRHTVDPDRHIERVTELQELFLTRVGLDIGKVWVADDGAAVAVWTTPESVEAGAVFAEIGPRMAELSGSRLAAQQQMEGLLAPHRPKEPAWFLATVGVSPDHQGKGLGSAVVLPGVEAAERAGVPAFLETSAPRNLPFYERLGFTVTADVEVPEGPRTWCMTRKPGA

SEQ ID NO: 22788 - protein, 9 aa, Artificial Sequence
  Synthetic Polypeptide
GGGGGGGGG

SEQ ID NO: 22789 - protein, 1148 aa, Artificial Sequence
  Synthetic Polypeptide
MALPVTALLLPLALLLHAARPDEIVLTQSPATLSLSPGERATLSCSASSSVSYMHWYQQKPGQAPRLLIYDTSKLASGIPARFSGSGSGTDFTLTISSLEPEDVAVYYCFQGSVYPFTFGQGTKLEIKRGGGGSGGGGSGGGGSQVQLQESGPGLVKPSQTLSLTCTVSGGSISTSGMGVGWIRQHPGKGLEWIGHIWWDDDKRYNPALKSRVTISVDTSKNQFSLKLSSVTAADTAVYYCARMELWSYYFDYWGQGTLVTVSSLEGKPIPNPLLGLDSTGSGEDLKNVFPPEVAVFEPSKAEIAHTQKATLVCLATGFYPDHVELSWWVNGKEVHSGVCTDPQPLKEQPALNDSRYCLSSRLRVSATFWQNPRNHFRCQVQFYGLSENDEWTQDRAKPVTQIVSAEAWGRADCGITSASYHQGVLSATILYEILLGKATLYAVLVSALVLMAMVKRKDSRGRAKRSGSGATNFSLLKQAGDVEENPGPTSMALPVTALLLPLALLLHAARPDIVMTQSPDSLAVSLGERATINCESSQSLLNSGNQKNYLTWYQQKPGQPPKPLIYWASTRESGVPDRFSGSGSGTDFTLTISSLQAEDVAVYYCQNDYSYPYTFGQGTKLEIKRGGGGSGGGGSGGGGSEVQLVQSGAEVKKPGESLKISCKGSGYSFTDYYMKWARQMPGKGLEWMGDIIPSNGATFYNQKFKGQVTISADKSISTTYLQWSSLKASDTAMYYCARSHLLRASWFAYWGQGTMVTVSSTREQKLISEEDGSGIQNPDPAVYQLRDSKSSDKSVCLFTDFDSQTNVSQSKDSDVYITDKCVLDMRSMDFKSNSAVAWSNKSDFACANAFNNSIIPEDTFFPSSDVPCDVKLVEKSFETDTNLNFQNLSVIGFRILLLKVAGFNLLMTLRLWSSRAKRSGSGVKQTLNFDLLKLAGDVESNPGPSRGHMTEYKPTVRLATRDDVPRAVRTLAAAFADYPATRHTVDPDRHIERVTELQELFLTRVGLDIGKVWVADDGAAVAVWTTPESVEAGAVFAEIGPRMAELSGSRLAAQQQMEGLLAPHRPKEPAWFLATVGVSPDHQGKGLGSAVVLPGVEAAERAGVPAFLETSAPRNLPFYERLGFTVTADVEVPEGPRTWCMTRKPGA

SEQ ID NO: 22790 - protein, 1147 aa, Artificial Sequence
  Synthetic Polypeptide
MALPVTALLLPLALLLHAARPLEGKPIPNPLLGLDSTGSGEDLKNVFPPEVAVFEPSKAEIAHTQKATLVCLATGFYPDHVELSWWVNGKEVHSGVCTDPQPLKEQPALNDSRYCLSSRLRVSATFWQNPRNHFRCQVQFYGLSENDEWTQDRAKPVTQIVSAEAWGRADCGITSASYHQGVLSATILYEILLGKATLYAVLVSALVLMAMVKRKDSRGRAKRSGSGATNFSLLKQAGDVEENPGPTSMALPVTALLLPLALLLHAARPDQIVLTQSPAIMSASPGEKVTISCSASSSVSYMYWYQQKPGSSPKPWIYRTSNLASGVPARFSGSGSGTSYSLTISNMEAEDAAAYYCQQYHSYPTTFGGGTKLEVKGGGGSGGGGSGGGGSEVQLVESGGGLVQPKGSLKLSCAASGFSFNTYAMNWVRQAPGKGLEWIAHIRSKSNNFATYYADSVKDRFSISRDASENILFLQMNNLKTEDTAMYYCVRQGGDFPMDYWGQGTSVTVSSTREAAAKEIVLTQSPATLSLSPGERATLSCSASSSVSYMHWYQQKPGQAPRLLIYDTSKLASGIPARFSGSGSGTDFTLTISSLEPEDVAVYYCFQGSVYPFTFGQGTKLEIKRGGGGSGGGGSGGGGSQVQLQESGPGLVKPSQTLSLTCTVSGGSISTSGMGVGWIRQHPGKGLEWIGHIWWDDDKRYNPALKSRVTISVDTSKNQFSLKLSSVTAADTAVYYCARMELWSYYFDYWGQGTLVTVSSTREQKLISEEDGSGIQNPDPAVYQLRDSKSSDKSVCLFTDFDSQTNVSQSKDSDVYITDKCVLDMRSMDFKSNSAVAWSNKSDFACANAFNNSIIPEDTFFPSSDVPCDVKLVEKSFETDTNLNFQNLSVIGFRILLLKVAGFNLLMTLRLWSSRAKRSGSGVKQTLNFDLLKLAGDVESNPGPSRGHMTEYKPTVRLATRDDVPRAVRTLAAAFADYPATRHTVDPDRHIERVTELQELFLTRVGLDIGKVWVADDGAAVAVWTTPESVEAGAVFAEIGPRMAELSGSRLAAQQQMEGLLAPHRPKEPAWFLATVGVSPDHQGKGLGSAVVLPGVEAAERAGVPAFLETSAPRNLPFYERLGFTVTADVEVPEGPRTWCMTRKPGA

SEQ ID NO: 22791 - protein, 1147 aa, Artificial Sequence
  Synthetic Polypeptide
MALPVTALLLPLALLLHAARPLEGKPIPNPLLGLDSTGSGEDLKNVFPPEVAVFEPSKAEIAHTQKATLVCLATGFYPDHVELSWWVNGKEVHSGVCTDPQPLKEQPALNDSRYCLSSRLRVSATFWQNPRNHFRCQVQFYGLSENDEWTQDRAKPVTQIVSAEAWGRADCGITSASYHQGVLSATILYEILLGKATLYAVLVSALVLMAMVKRKDSRGRAKRSGSGATNFSLLKQAGDVEENPGPTSTMALPVTALLLPLALLLHAARPDIQMTQSPSSLSASVGDRVTITCKASQDVGIAVAWYQQKPGKVPKLLIYWASTRHTGVPDRFSGSGSGTDFTLTISSLQPEDVATYYCQQYSSYPYTFGQGTKVEIKGGGGSGGGGSGGGGSEVQLVESGGGLVQPGGSLRLSCAASGFDFSRYWMSWVRQAPGKGLEWIGEINPDSSTINYAPSLKDKFIISRDNAKNSLYLQMNSLRAEDTAVYYCARPDGNYWYFDVWGQGTLVTVSSTREAAAKEIVLTQSPATLSLSPGERATLSCSASSSVSYMHWYQQKPGQAPRLLIYDTSKLASGIPARFSGSGSGTDFTLTISSLEPEDVAVYYCFQGSVYPFTFGQGTKLEIKRGGGGSGGGGSGGGGSQVQLQESGPGLVKPSQTLSLTCTVSGGSISTSGMGVGWIRQHPGKGLEWIGHIWWDDDKRYNPALKSRVTISVDTSKNQFSLKLSSVTAADTAVYYCARMELWSYYFDYWGQGTLVTVSSTREQKLISEEDGSGIQNPDPAVYQLRDSKSSDKSVCLFTDFDSQTNVSQSKDSDVYITDKCVLDMRSMDFKSNSAVAWSNKSDFACANAFNNSIIPEDTFFPSSDVPCDVKLVEKSFETDTNLNFQNLSVIGFRILLLKVAGFNLLMTLRLWSSRAKRSGSGVKQTLNFDLLKLAGDVESNPGPSRGHMTEYKPTVRLATRDDVPRAVRTLAAAFADYPATRHTVDPDRHIERVTELQELFLTRVGLDIGKVWVADDGAAVAVWTTPESVEAGAVFAEIGPRMAELSGSRLAAQQQMEGLLAPHRPKEPAWFLATVGVSPDHQGKGLGSAVVLPGVEAAERAGVPAFLETSAPRNLPFYERLGFTVTADVEVPEGPRTWCMTRKPGA

SEQ ID NO: 22792 - protein, 1151 aa, Artificial Sequence
  Synthetic Polypeptide
MALPVTALLLPLALLLHAARPLEGKPIPNPLLGLDSTGSGEDLKNVFPPEVAVFEPSKAEIAHTQKATLVCLATGFYPDHVELSWWVNGKEVHSGVCTDPQPLKEQPALNDSRYCLSSRLRVSATFWQNPRNHFRCQVQFYGLSENDEWTQDRAKPVTQIVSAEAWGRADCGITSASYHQGVLSATILYEILLGKATLYAVLVSALVLMAMVKRKDSRGRAKRSGSGATNFSLLKQAGDVEENPGPTSTMALPVTALLLPLALLLHAARPDEIVLTQSPATLSLSPGERATLSCSASSSVSYMHWYQQKPGQAPRLLIYDTSKLASGIPARFSGSGSGTDFTLTISSLEPEDVAVYYCFQGSVYPFTFGQGTKLEIKRGGGGSGGGGSGGGGSQVQLQESGPGLVKPSQTLSLTCTVSGGSISTSGMGVGWIRQHPGKGLEWIGHIWWDDDKRYNPALKSRVTISVDTSKNQFSLKLSSVTAADTAVYYCARMELWSYYFDYWGQGTLVTVSSTREAAAKEIVLTQSPATLSLSPGERATLSCRASQSVSSYLAWYQQKPGQAPRLLIYDASNRATGIPARFSGSGSGTDFTLTISSLEPEDFAVYYCQQRSNWPITFGQGTRLEIKGGGGSGGGGSGGGGSEVQLVESGGGLVQPGRSLRLSCAASGFTFNDYAMHWVRQAPGKGLEWVSTISWNSGSIGYADSVKGRFTISRDNAKKSLYLQMNSLRAEDTALYYCAKDIQYGNYYYGMDVWGQGTTVTVSSTREQKLISEEDGSGIQNPDPAVYQLRDSKSSDKSVCLFTDFDSQTNVSQSKDSDVYITDKCVLDMRSMDFKSNSAVAWSNKSDFACANAFNNSIIPEDTFFPSSDVPCDVKLVEKSFETDTNLNFQNLSVIGFRILLLKVAGFNLLMTLRLWSSRAKRSGSGVKQTLNFDLLKLAGDVESNPGPSRGHMTEYKPTVRLATRDDVPRAVRTLAAAFADYPATRHTVDPDRHIERVTELQELFLTRVGLDIGKVWVADDGAAVAVWTTPESVEAGAVFAEIGPRMAELSGSRLAAQQQMEGLLAPHRPKEPAWFLATVGVSPDHQGKGLGSAVVLPGVEAAERAGVPAFLETSAPRNLPFYERLGFTVTADVEVPEGPRTWCMTRKPGA

SEQ ID NO: 22793 - protein, 1150 aa, Artificial Sequence
  Synthetic Polypeptide
MALPVTALLLPLALLLHAARPLEGKPIPNPLLGLDSTGSGEDLKNVFPPEVAVFEPSKAEIAHTQKATLVCLATGFYPDHVELSWWVNGKEVHSGVCTDPQPLKEQPALNDSRYCLSSRLRVSATFWQNPRNHFRCQVQFYGLSENDEWTQDRAKPVTQIVSAEAWGRADCGITSASYHQGVLSATILYEILLGKATLYAVLVSALVLMAMVKRKDSRGRAKRSGSGATNFSLLKQAGDVEENPGPTSTMALPVTALLLPLALLLHAARPEIVMTQSPATLSLSPGERATLSCRASQDISKYLNWYQQKPGQAPRLLIYHTSRLHSGIPARFSGSGSGTDYTLTISSLQPEDFAVYFCQQGNTLPYTFGQGTKLEIKGGGGSGGGGSGGGGSQVQLQESGPGLVKPSETLSLTCTVSGVSLPDYGVSWIRQPPGKGLEWIGVIWGSETTYYNSSLKSRVTISKDNSKNQVSLKLSSVTAADTAVYYCAKHYYYGGSYAMDYWGQGTLVTVSSTREAAAKEIVLTQSPATLSLSPGERATLSCRASQSVSSYLAWYQQKPGQAPRLLIYDASNRATGIPARFSGSGSGTDFTLTISSLEPEDFAVYYCQQRSNWPITFGQGTRLEIKGGGGSGGGGSGGGGSEVQLVESGGGLVQPGRSLRLSCAASGFTFNDYAMHWVRQAPGKGLEWVSTISWNSGSIGYADSVKGRFTISRDNAKKSLYLQMNSLRAEDTALYYCAKDIQYGNYYYGMDVWGQGTTVTVSSTREQKLISEEDGSGIQNPDPAVYQLRDSKSSDKSVCLFTDFDSQTNVSQSKDSDVYITDKCVLDMRSMDFKSNSAVAWSNKSDFACANAFNNSIIPEDTFFPSSDVPCDVKLVEKSFETDTNLNFQNLSVIGFRILLLKVAGFNLLMTLRLWSSRAKRSGSGVKQTLNFDLLKLAGDVESNPGPSRGHMTEYKPTVRLATRDDVPRAVRTLAAAFADYPATRHTVDPDRHIERVTELQELFLTRVGLDIGKVWVADDGAAVAVWTTPESVEAGAVFAEIGPRMAELSGSRLAAQQQMEGLLAPHRPKEPAWFLATVGVSPDHQGKGLGSAVVLPGVEAAERAGVPAFLETSAPRNLPFYERLGFTVTADVEVPEGPRTWCMTRKPGA

SEQ ID NO: 22794 - protein, 1147 aa, Artificial Sequence
  Synthetic Polypeptide
MALPVTALLLPLALLLHAARPLEGKPIPNPLLGLDSTGSGEDLKNVFPPEVAVFEPSKAEIAHTQKATLVCLATGFYPDHVELSWWVNGKEVHSGVCTDPQPLKEQPALNDSRYCLSSRLRVSATFWQNPRNHFRCQVQFYGLSENDEWTQDRAKPVTQIVSAEAWGRADCGITSASYHQGVLSATILYEILLGKATLYAVLVSALVLMAMVKRKDSRGRAKRSGSGATNFSLLKQAGDVEENPGPTSTMALPVTALLLPLALLLHAARPDIQMTQSPSSLSASVGDRVTITCKASQDVGIAVAWYQQKPGKVPKLLIYWASTRHTGVPDRFSGSGSGTDFTLTISSLQPEDVATYYCQQYSSYPYTFGQGTKVEIKGGGGSGGGGSGGGGSEVQLVESGGGLVQPGGSLRLSCAASGFDFSRYWMSWVRQAPGKGLEWIGEINPDSSTINYAPSLKDKFIISRDNAKNSLYLQMNSLRAEDTAVYYCARPDGNYWYFDVWGQGTLVTVSSTREAAAKDIQMTQTTSSLSASLGDRVTISCRASQDISKYLNWYQQKPDGTVKLLIYHTSRLHSGVPSRFSGSGSGTDYSLTISNLEQEDIATYFCQQGNTLPYTFGGGTKLEITGGGGSGGGGSGGGGSEVKLQESGPGLVAPSQSLSVTCTVSGVSLPDYGVSWIRQPPRKGLEWLGVIWGSETTYYNSALKSRLTIIKDNSKSQVFLKMNSLQTDDTAIYYCAKHYYYGGSYAMDYWGQGTSVTVSSTREQKLISEEDGSGIQNPDPAVYQLRDSKSSDKSVCLFTDFDSQTNVSQSKDSDVYITDKCVLDMRSMDFKSNSAVAWSNKSDFACANAFNNSIIPEDTFFPSSDVPCDVKLVEKSFETDTNLNFQNLSVIGFRILLLKVAGFNLLMTLRLWSSRAKRSGSGVKQTLNFDLLKLAGDVESNPGPSRGHMTEYKPTVRLATRDDVPRAVRTLAAAFADYPATRHTVDPDRHIERVTELQELFLTRVGLDIGKVWVADDGAAVAVWTTPESVEAGAVFAEIGPRMAELSGSRLAAQQQMEGLLAPHRPKEPAWFLATVGVSPDHQGKGLGSAVVLPGVEAAERAGVPAFLETSAPRNLPFYERLGFTVTADVEVPEGPRTWCMTRKPGA

SEQ ID NO: 22795 - protein, 1141 aa, Artificial Sequence
  Synthetic Polypeptide
MALPVTALLLPLALLLHAARPDEIVLTQSPATLSLSPGERATLSCSASSSVSYMHWYQQKPGQAPRLLIYDTSKLASGIPARFSGSGSGTDFTLTISSLEPEDVAVYYCFQGSVYPFTFGQGTKLEIKRGGGGSGGGGSGGGGSQVQLQESGPGLVKPSQTLSLTCTVSGGSISTSGMGVGWIRQHPGKGLEWIGHIWWDDDKRYNPALKSRVTISVDTSKNQFSLKLSSVTAADTAVYYCARMELWSYYFDYWGQGTLVTVSSLEGKPIPNPLLGLDSTGSGEDLKNVFPPEVAVFEPSKAEIAHTQKATLVCLATGFYPDHVELSWWVNGKEVHSGVCTDPQPLKEQPALNDSRYCLSSRLRVSATFWQNPRNHFRCQVQFYGLSENDEWTQDRAKPVTQIVSAEAWGRADCGITSASYHQGVLSATILYEILLGKATLYAVLVSALVLMAMVKRKDSRGRAKRSGSGATNFSLLKQAGDVEENPGPTSTMALPVTALLLPLALLLHAARPDIQMTQSPSSLSASVGDRVTITCKASQDVGIAVAWYQQKPGKVPKLLIYWASTRHTGVPDRFSGSGSGTDFTLTISSLQPEDVATYYCQQYSSYPYTFGQGTKVEIKGGGGSGGGGSGGGGSEVQLVESGGGLVQPGGSLRLSCAASGFDFSRYWMSWVRQAPGKGLEWIGEINPDSSTINYAPSLKDKFIISRDNAKNSLYLQMNSLRAEDTAVYYCARPDGNYWYFDVWGQGTLVTVSSTREQKLISEEDGSGIQNPDPAVYQLRDSKSSDKSVCLFTDFDSQTNVSQSKDSDVYITDKCVLDMRSMDFKSNSAVAWSNKSDFACANAFNNSIIPEDTFFPSSDVPCDVKLVEKSFETDTNLNFQNLSVIGFRILLLKVAGFNLLMTLRLWSSRAKRSGSGVKQTLNFDLLKLAGDVESNPGPSRGHMTEYKPTVRLATRDDVPRAVRTLAAAFADYPATRHTVDPDRHIERVTELQELFLTRVGLDIGKVWVADDGAAVAVWTTPESVEAGAVFAEIGPRMAELSGSRLAAQQQMEGLLAPHRPKEPAWFLATVGVSPDHQGKGLGSAVVLPGVEAAERAGVPAFLETSAPRNLPFYERLGFTVTADVEVPEGPRTWCMTRKPGA

SEQ ID NO: 22796 - protein, 1100 aa, Artificial Sequence
  Synthetic Polypeptide
MALPVTALLLPLALLLHAARPDIQMTQTTSSLSASLGDRVTISCRASQDISKYLNWYQQKPDGTVKLLIYHTSRLHSGVPSRFSGSGSGTDYSLTISNLEQEDIATYFCQQGNTLPYTFGGGTKLEITEVAALERDIVMTQSPATLSLSPGERATLSCRSSKSLQNVNGNTYLYWFQQKPGQSPQLLIYRMSNLNSGVPDRFSGSGSGTEFTLTISSLEPEDFAVYYCMQHLEYPITFGAGTKLEIKLEDLKNVFPPEVAVFEPSKAEIAHTQKATLVCLATGFYPDHVELSWWVNGKEVHSGVCTDPQPLKEQPALNDSRYCLSSRLRVSATFWQNPRNHFRCQVQFYGLSENDEWTQDRAKPVTQIVSAEAWGRADCGITSASYHQGVLSATILYEILLGKATLYAVLVSALVLMAMVKRKDSRGRAKRSGSGATNFSLLKQAGDVEENPGPTSATMDWIWRILFLVGAATGAHSFEVKLQESGPGLVAPSQSLSVTCTVSGVSLPDYGVSWIRQPPRKGLEWLGVIWGSETTYYNSALKSRLTIIKDNSKSQVFLKMNSLQTDDTAIYYCAKHYYYGGSYAMDYWGQGTSVTVSSRVAALKEVQLVESGGGLVKPGGSLKLSCAASGYTFTSYVMHWVRQAPGKGLEWIGYINPYNDGTKYNEKFQGRVTISSDKSISTAYMELSSLRSEDTAMYYCARGTYYYGTRVFDYWGQGTLVTVSSTRIQNPDPAVYQLRDSKSSDKSVCLFTDFDSQTNVSQSKDSDVYITDKCVLDMRSMDFKSNSAVAWSNKSDFACANAFNNSIIPEDTFFPSSDVPCDVKLVEKSFETDTNLNFQNLSVIGFRILLLKVAGFNLLMTLRLWSSRAKRSGSGVKQTLNFDLLKLAGDVESNPGPSRGHMTEYKPTVRLATRDDVPRAVRTLAAAFADYPATRHTVDPDRHIERVTELQELFLTRVGLDIGKVWVADDGAAVAVWTTPESVEAGAVFAEIGPRMAELSGSRLAAQQQMEGLLAPHRPKEPAWFLATVGVSPDHQGKGLGSAVVLPGVEAAERAGVPAFLETSAPRNLPFYERLGFTVTADVEVPEGPRTWCMTRKPGA

SEQ ID NO: 22797 - protein, 1098 aa, Artificial Sequence
  Synthetic Polypeptide
MALPVTALLLPLALLLHAARPDIQMTQTTSSLSASLGDRVTISCRASQDISKYLNWYQQKPDGTVKLLIYHTSRLHSGVPSRFSGSGSGTDYSLTISNLEQEDIATYFCQQGNTLPYTFGGGTKLEITEVAALERSSELTQDPAVSVALGQTVRITCQGDSLRSYYASWYQQKPGQAPVLVIYGKNNRPSGIPDRFSGSSSGNTASLTITGAQAEDEADYYCNSRDSSGWVFGGGTKLTVLLEIQNPDPAVYQLRDSKSSDKSVCLFTDFDSQTNVSQSKDSDVYITDKCVLDMRSMDFKSNSAVAWSNKSDFACANAFNNSIIPEDTFFPSSDVPCDVKLVEKSFETDTNLNFQNLSVIGFRILLLKVAGFNLLMTLRLWSSRAKRSGSGVKQTLNFDLLKLAGDVESNPGPTSATMDWIWRILFLVGAATGAHSFEVKLQESGPGLVAPSQSLSVTCTVSGVSLPDYGVSWIRQPPRKGLEWLGVIWGSETTYYNSALKSRLTIIKDNSKSQVFLKMNSLQTDDTAIYYCAKHYYYGGSYAMDYWGQGTSVTVSSRVAALKEVQLVESGGGLVQPGRSLRLSCAASGFTFDDYAMHWVRQAPGKGLEWVSGISWNSGSIGYADSVKGRFTISRDNAKNSLYLQMNSLRAEDTALYYCAKDKGGGYYDFWSGSDYWGQGTLVTVSSTREDLKNVFPPEVAVFEPSKAEIAHTQKATLVCLATGFYPDHVELSWWVNGKEVHSGVCTDPQPLKEQPALNDSRYCLSSRLRVSATFWQNPRNHFRCQVQFYGLSENDEWTQDRAKPVTQIVSAEAWGRADCGITSASYHQGVLSATILYEILLGKATLYAVLVSALVLMAMVKRKDSRGRAKRSGSGATNFSLLKQAGDVEENPGPSRGHMTEYKPTVRLATRDDVPRAVRTLAAAFADYPATRHTVDPDRHIERVTELQELFLTRVGLDIGKVWVADDGAAVAVWTTPESVEAGAVFAEIGPRMAELSGSRLAAQQQMEGLLAPHRPKEPAWFLATVGVSPDHQGKGLGSAVVLPGVEAAERAGVPAFLETSAPRNLPFYERLGFTVTADVEVPEGPRTWCMTRKPGA

SEQ ID NO: 22798 - protein, 1101 aa, Artificial Sequence
  Synthetic Polypeptide
MALPVTALLLPLALLLHAARPDIQMTQTTSSLSASLGDRVTISCRASQDISNYLNWYQQKPDGTVKLLIYYTSILHSGVPSRFSGSGSGTDYSLTISNLEQEDFATYFCQQGNTLPWTFGGGTKLEIKAEVAALERDEIVLTQSPATLSLSPGERATLSCRASQSVSSYLAWYQQKPGQAPRLLIYDASNRATGIPARFSGSGSGTDFTLTISSLEPEDFAVYYCQQRSNWPITFGQGTRLEIKLEIQNPDPAVYQLRDSKSSDKSVCLFTDFDSQTNVSQSKDSDVYITDKCVLDMRSMDFKSNSAVAWSNKSDFACANAFNNSIIPEDTFFPSSDVPCDVKLVEKSFETDTNLNFQNLSVIGFRILLLKVAGFNLLMTLRLWSSRAKRSGSGVKQTLNFDLLKLAGDVESNPGPTSATMDWIWRILFLVGAATGAHSFEVQLVESGGGLVKPGGSLKLSCAASGFAFSIYDMSWVRQTPEKRLEWVAYISSGGGTYYPDTVKGRFTISRDNAKNTLYLQMSSLKSEDTAMYYCARHSGYGTHWGVLFAYWGQGTLVTVSARVAALKEVQLVESGGGLVQPGRSLRLSCAASGFTFNDYAMHWVRQAPGKGLEWVSTISWNSGSIGYADSVKGRFTISRDNAKKSLYLQMNSLRAEDTALYYCAKDIQYGNYYYGMDVWGQGTTVTVSSTREDLKNVFPPEVAVFEPSKAEIAHTQKATLVCLATGFYPDHVELSWWVNGKEVHSGVCTDPQPLKEQPALNDSRYCLSSRLRVSATFWQNPRNHFRCQVQFYGLSENDEWTQDRAKPVTQIVSAEAWGRADCGITSASYHQGVLSATILYEILLGKATLYAVLVSALVLMAMVKRKDSRGRAKRSGSGATNFSLLKQAGDVEENPGPSRGHMTEYKPTVRLATRDDVPRAVRTLAAAFADYPATRHTVDPDRHIERVTELQELFLTRVGLDIGKVWVADDGAAVAVWTTPESVEAGAVFAEIGPRMAELSGSRLAAQQQMEGLLAPHRPKEPAWFLATVGVSPDHQGKGLGSAVVLPGVEAAERAGVPAFLETSAPRNLPFYERLGFTVTADVEVPEGPRTWCMTRKPGA

SEQ ID NO: 22799 - protein, 9 aa, Artificial Sequence
  Synthetic Polypeptide
GGGGGGGGG

SEQ ID NO: 22800 - protein, 862 aa, Artificial Sequence
  Synthetic Polypeptide
MALPVTALLLPLALLLHAARPQLQLQESGPGLVKPSETLSLTCTVSGDSISSGDYYWGWIRQPPGKGLEWIGHIYYSGVTYYNPSLKSRVTISVDTSRNQFSLKLSSVTAADTAVYYCTREDSSNWRSRGQGTLVTVSSLEDLKNVFPPEVAVFEPSEAEISHTQKATLVCLATGFYPDHVELSWWVNGKEVHSGVCTDPQPLKEQPALNDSRYCLSSRLRVSATFWQNPRNHFRCQVQFYGLSENDEWTQDRAKPVTQIVSAEAWGRADCGFTSESYQQGVLSATILYEILLGKATLYAVLVSALVLMAMVKRKDSRGRAKRSGSGATNFSLLKQAGDVEENPGPTSMDWIWRILFLVGAATGAHSFEVQLLESGGGLIQPGGSLRLSCAASGFTFSSHAMTWVRQAPGKGLEWVSAISGSGDYTHYADSVKGRFTISRDNSKNTVYLQMNSLRAEDSAVYYCAKDEDGGSLLGHRGQGTLVTVSSTRIQNPDPAVYQLRDSKSSDKSVCLFTDFDSQTNVSQSKDSDVYITDKCVLDMRSMDFKSNSAVAWSNKSDFACANAFNNSIIPEDTFFPSPESSCDVKLVEKSFETDTNLNFQNLSVIGFRILLLKVAGFNLLMTLRLWSSRAKRSGSGVKQTLNFDLLKLAGDVESNPGPSRGHMTEYKPTVRLATRDDVPRAVRTLAAAFADYPATRHTVDPDRHIERVTELQELFLTRVGLDIGKVWVADDGAAVAVWTTPESVEAGAVFAEIGPRMAELSGSRLAAQQQMEGLLAPHRPKEPAWFLATVGVSPDHQGKGLGSAVVLPGVEAAERAGVPAFLETSAPRNLPFYERLGFTVTADVEVPEGPRTWCMTRKPGA

SEQ ID NO: 22801 - protein, 865 aa, Artificial Sequence
  Synthetic Polypeptide
MALPVTALLLPLALLLHAARPQLQLQESGPGLVKPSETLSLTCTVSGDSISSGDYYWGWIRQPPGKGLEWIGHIYYSGVTYYNPSLKSRVTISVDTSRNQFSLKLSSVTAADTAVYYCTREDSSNWRSRGQGTLVTVSSLEDLKNVFPPEVAVFEPSEAEISHTQKATLVCLATGFYPDHVELSWWVNGKEVHSGVCTDPQPLKEQPALNDSRYCLSSRLRVSATFWQNPRNHFRCQVQFYGLSENDEWTQDRAKPVTQIVSAEAWGRADCGFTSESYQQGVLSATILYEILLGKATLYAVLVSALVLMAMVKRKDSRGRAKRSGSGATNFSLLKQAGDVEENPGPTSMDWIWRILFLVGAATGAHSFEEVQLLESGGGLVQPGGSLRLSCAASGFTFSSYAMSWVRQAPGKGLEWVSSISGSGDYIYYADSVKGRFTISRDISKNTLYLQMNSLRAEDTAVYYCAKEGTGANSSLADYRGQGTLVTVSSTRIQNPDPAVYQLRDSKSSDKSVCLFTDFDSQTNVSQSKDSDVYITDKCVLDMRSMDFKSNSAVAWSNKSDFACANAFNNSIIPEDTFFPSPESSCDVKLVEKSFETDTNLNFQNLSVIGFRILLLKVAGFNLLMTLRLWSSRAKRSGSGVKQTLNFDLLKLAGDVESNPGPSRGHMTEYKPTVRLATRDDVPRAVRTLAAAFADYPATRHTVDPDRHIERVTELQELFLTRVGLDIGKVWVADDGAAVAVWTTPESVEAGAVFAEIGPRMAELSGSRLAAQQQMEGLLAPHRPKEPAWFLATVGVSPDHQGKGLGSAVVLPGVEAAERAGVPAFLETSAPRNLPFYERLGFTVTADVEVPEGPRTWCMTRKPGA

SEQ ID NO: 22802 - protein, 862 aa, Artificial Sequence
  Synthetic Polypeptide
MALPVTALLLPLALLLHAARPQLQLQESGPGLVKPSETLSLTCTVSGDSISSGDYYWGWIRQPPGKGLEWIGHIYYSGVTYYNPSLKSRVTISVDTSRNQFSLKLSSVTAADTAVYYCTREDSSNWRSRGQGTLVTVSSLEDLKNVFPPEVAVFEPSEAEISHTQKATLVCLATGFYPDHVELSWWVNGKEVHSGVCTDPQPLKEQPALNDSRYCLSSRLRVSATFWQNPRNHFRCQVQFYGLSENDEWTQDRAKPVTQIVSAEAWGRADCGFTSESYQQGVLSATILYEILLGKATLYAVLVSALVLMAMVKRKDSRGRAKRSGSGATNFSLLKQAGDVEENPGPTSMDWIWRILFLVGAATGAHSFEQVQLVESGGGLVQPGGSLRLSCAASGFTFTNHAMSWVRQAPGKGLELVSSISGNGRTTYYADSVKGRFTISRDISKNTLDLQMNSLRAEDTAVYYCAKDGGETLVDSRGQGTLVTVSSTRIQNPDPAVYQLRDSKSSDKSVCLFTDFDSQTNVSQSKDSDVYITDKCVLDMRSMDFKSNSAVAWSNKSDFACANAFNNSIIPEDTFFPSPESSCDVKLVEKSFETDTNLNFQNLSVIGFRILLLKVAGFNLLMTLRLWSSRAKRSGSGVKQTLNFDLLKLAGDVESNPGPSRGHMTEYKPTVRLATRDDVPRAVRTLAAAFADYPATRHTVDPDRHIERVTELQELFLTRVGLDIGKVWVADDGAAVAVWTTPESVEAGAVFAEIGPRMAELSGSRLAAQQQMEGLLAPHRPKEPAWFLATVGVSPDHQGKGLGSAVVLPGVEAAERAGVPAFLETSAPRNLPFYERLGFTVTADVEVPEGPRTWCMTRKPGA

SEQ ID NO: 22803 - protein, 865 aa, Artificial Sequence
  Synthetic Polypeptide
MALPVTALLLPLALLLHAARPEVQLLESGGGLVQPGGSLRLSCAASGFTFSSYAMSWVRQAPGKGLEWVSSISGSGDYIYYADSVKGRFTISRDISKNTLYLQMNSLRAEDTAVYYCAKEGTGANSSLADYRGQGTLVTVSSLEDLKNVFPPEVAVFEPSEAEISHTQKATLVCLATGFYPDHVELSWWVNGKEVHSGVCTDPQPLKEQPALNDSRYCLSSRLRVSATFWQNPRNHFRCQVQFYGLSENDEWTQDRAKPVTQIVSAEAWGRADCGFTSESYQQGVLSATILYEILLGKATLYAVLVSALVLMAMVKRKDSRGRAKRSGSGATNFSLLKQAGDVEENPGPTSMDWIWRILFLVGAATGAHSFEVQLLESGGGLIQPGGSLRLSCAASGFTFSSHAMTWVRQAPGKGLEWVSAISGSGDYTHYADSVKGRFTISRDNSKNTVYLQMNSLRAEDSAVYYCAKDEDGGSLLGHRGQGTLVTVSSTRIQNPDPAVYQLRDSKSSDKSVCLFTDFDSQTNVSQSKDSDVYITDKCVLDMRSMDFKSNSAVAWSNKSDFACANAFNNSIIPEDTFFPSPESSCDVKLVEKSFETDTNLNFQNLSVIGFRILLLKVAGFNLLMTLRLWSSRAKRSGSGVKQTLNFDLLKLAGDVESNPGPSRGHMTEYKPTVRLATRDDVPRAVRTLAAAFADYPATRHTVDPDRHIERVTELQELFLTRVGLDIGKVWVADDGAAVAVWTTPESVEAGAVFAEIGPRMAELSGSRLAAQQQMEGLLAPHRPKEPAWFLATVGVSPDHQGKGLGSAVVLPGVEAAERAGVPAFLETSAPRNLPFYERLGFTVTADVEVPEGPRTWCMTRKPGA

SEQ ID NO: 22804 - protein, 865 aa, Artificial Sequence
  Synthetic Polypeptide
MALPVTALLLPLALLLHAARPQVQLVESGGGLVQPGGSLRLSCAASGFTFTNHAMSWVRQAPGKGLELVSSISGNGRTTYYADSVKGRFTISRDISKNTLDLQMNSLRAEDTAVYYCAKDGGETLVDSRGQGTLVTVSSLEDLKNVFPPEVAVFEPSEAEISHTQKATLVCLATGFYPDHVELSWWVNGKEVHSGVCTDPQPLKEQPALNDSRYCLSSRLRVSATFWQNPRNHFRCQVQFYGLSENDEWTQDRAKPVTQIVSAEAWGRADCGFTSESYQQGVLSATILYEILLGKATLYAVLVSALVLMAMVKRKDSRGRAKRSGSGATNFSLLKQAGDVEENPGPTSMDWIWRILFLVGAATGAHSFEEVQLLESGGGLVQPGGSLRLSCAASGFTFSSYAMSWVRQAPGKGLEWVSSISGSGDYIYYADSVKGRFTISRDISKNTLYLQMNSLRAEDTAVYYCAKEGTGANSSLADYRGQGTLVTVSSTRIQNPDPAVYQLRDSKSSDKSVCLFTDFDSQTNVSQSKDSDVYITDKCVLDMRSMDFKSNSAVAWSNKSDFACANAFNNSIIPEDTFFPSPESSCDVKLVEKSFETDTNLNFQNLSVIGFRILLLKVAGFNLLMTLRLWSSRAKRSGSGVKQTLNFDLLKLAGDVESNPGPSRGHMTEYKPTVRLATRDDVPRAVRTLAAAFADYPATRHTVDPDRHIERVTELQELFLTRVGLDIGKVWVADDGAAVAVWTTPESVEAGAVFAEIGPRMAELSGSRLAAQQQMEGLLAPHRPKEPAWFLATVGVSPDHQGKGLGSAVVLPGVEAAERAGVPAFLETSAPRNLPFYERLGFTVTADVEVPEGPRTWCMTRKPGA

SEQ ID NO: 22805 - protein, 862 aa, Artificial Sequence
  Synthetic Polypeptide
MALPVTALLLPLALLLHAARPQVQLVESGGGLVQPGGSLRLSCAASGFTFTNHAMSWVRQAPGKGLELVSSISGNGRTTYYADSVKGRFTISRDISKNTLDLQMNSLRAEDTAVYYCAKDGGETLVDSRGQGTLVTVSSLEDLKNVFPPEVAVFEPSEAEISHTQKATLVCLATGFYPDHVELSWWVNGKEVHSGVCTDPQPLKEQPALNDSRYCLSSRLRVSATFWQNPRNHFRCQVQFYGLSENDEWTQDRAKPVTQIVSAEAWGRADCGFTSESYQQGVLSATILYEILLGKATLYAVLVSALVLMAMVKRKDSRGRAKRSGSGATNFSLLKQAGDVEENPGPTSMDWIWRILFLVGAATGAHSFEVQLLESGGGLIQPGGSLRLSCAASGFTFSSHAMTWVRQAPGKGLEWVSAISGSGDYTHYADSVKGRFTISRDNSKNTVYLQMNSLRAEDSAVYYCAKDEDGGSLLGHRGQGTLVTVSSTRIQNPDPAVYQLRDSKSSDKSVCLFTDFDSQTNVSQSKDSDVYITDKCVLDMRSMDFKSNSAVAWSNKSDFACANAFNNSIIPEDTFFPSPESSCDVKLVEKSFETDTNLNFQNLSVIGFRILLLKVAGFNLLMTLRLWSSRAKRSGSGVKQTLNFDLLKLAGDVESNPGPSRGHMTEYKPTVRLATRDDVPRAVRTLAAAFADYPATRHTVDPDRHIERVTELQELFLTRVGLDIGKVWVADDGAAVAVWTTPESVEAGAVFAEIGPRMAELSGSRLAAQQQMEGLLAPHRPKEPAWFLATVGVSPDHQGKGLGSAVVLPGVEAAERAGVPAFLETSAPRNLPFYERLGFTVTADVEVPEGPRTWCMTRKPGA

SEQ ID NO: 22806 - protein, 868 aa, Artificial Sequence
  Synthetic Polypeptide
MALPVTALLLPLALLLHAARPEVQLLESGGGLVQPGGSLRLSCAASGFTFSSYAMSWVRQAPGKGLEWVSSISGSGDYIYYADSVKGRFTISRDISKNTLYLQMNSLRAEDTAVYYCAKEGTGANSSLADYRGQGTLVTVSSLEDLKNVFPPEVAVFEPSEAEISHTQKATLVCLATGFYPDHVELSWWVNGKEVHSGVCTDPQPLKEQPALNDSRYCLSSRLRVSATFWQNPRNHFRCQVQFYGLSENDEWTQDRAKPVTQIVSAEAWGRADCGFTSESYQQGVLSATILYEILLGKATLYAVLVSALVLMAMVKRKDSRGRAKRSGSGATNFSLLKQAGDVEENPGPTSMDWIWRILFLVGAATGAHSFEEVQLLESGGGLVQPGGSLRLSCAASGFTFSSYAMSWVRQAPGKGLEWVSSISGSGDYIYYADSVKGRFTISRDISKNTLYLQMNSLRAEDTAVYYCAKEGTGANSSLADYRGQGTLVTVSSTRIQNPDPAVYQLRDSKSSDKSVCLFTDFDSQTNVSQSKDSDVYITDKCVLDMRSMDFKSNSAVAWSNKSDFACANAFNNSIIPEDTFFPSPESSCDVKLVEKSFETDTNLNFQNLSVIGFRILLLKVAGFNLLMTLRLWSSRAKRSGSGVKQTLNFDLLKLAGDVESNPGPSRGHMTEYKPTVRLATRDDVPRAVRTLAAAFADYPATRHTVDPDRHIERVTELQELFLTRVGLDIGKVWVADDGAAVAVWTTPESVEAGAVFAEIGPRMAELSGSRLAAQQQMEGLLAPHRPKEPAWFLATVGVSPDHQGKGLGSAVVLPGVEAAERAGVPAFLETSAPRNLPFYERLGFTVTADVEVPEGPRTWCMTRKPGA

SEQ ID NO: 22807 - protein, 856 aa, Artificial Sequence
  Synthetic Polypeptide
MALPVTALLLPLALLLHAARPQLQLQESGPGLVKPSETLSLTCTVSGDSISSGDYYWGWIRQPPGKGLEWIGHIYYSGVTYYNPSLKSRVTISVDTSRNQFSLKLSSVTAADTAVYYCTREDSSNWRSRGQGTLVTVSSLEDLKNVFPPEVAVFEPSEAEISHTQKATLVCLATGFYPDHVELSWWVNGKEVHSGVCTDPQPLKEQPALNDSRYCLSSRLRVSATFWQNPRNHFRCQVQFYGLSENDEWTQDRAKPVTQIVSAEAWGRADCGFTSESYQQGVLSATILYEILLGKATLYAVLVSALVLMAMVKRKDSRGRAKRSGSGATNFSLLKQAGDVEENPGPTSMDWIWRILFLVGAATGAHSFEVQLLESGGGLVQPGGSLRLSCAASGFSFSSYALSWVRQAPGKGLEWVSSIGENDGTTDYADAVKGRFTISRDNSKNTLYLQMNSLRVEDTAVYYCVKDGVHWGQGTLVTVSSTRIQNPDPAVYQLRDSKSSDKSVCLFTDFDSQTNVSQSKDSDVYITDKCVLDMRSMDFKSNSAVAWSNKSDFACANAFNNSIIPEDTFFPSPESSCDVKLVEKSFETDTNLNFQNLSVIGFRILLLKVAGFNLLMTLRLWSSRAKRSGSGVKQTLNFDLLKLAGDVESNPGPSRGHMTEYKPTVRLATRDDVPRAVRTLAAAFADYPATRHTVDPDRHIERVTELQELFLTRVGLDIGKVWVADDGAAVAVWTTPESVEAGAVFAEIGPRMAELSGSRLAAQQQMEGLLAPHRPKEPAWFLATVGVSPDHQGKGLGSAVVLPGVEAAERAGVPAFLETSAPRNLPFYERLGFTVTADVEVPEGPRTWCMTRKPGA

SEQ ID NO: 22808 - protein, 862 aa, Artificial Sequence
  Synthetic Polypeptide
MALPVTALLLPLALLLHAARPQLQLQESGPGLVKPSETLSLTCTVSGDSISSGDYYWGWIRQPPGKGLEWIGHIYYSGVTYYNPSLKSRVTISVDTSRNQFSLKLSSVTAADTAVYYCTREDSSNWRSRGQGTLVTVSSLEDLKNVFPPEVAVFEPSEAEISHTQKATLVCLATGFYPDHVELSWWVNGKEVHSGVCTDPQPLKEQPALNDSRYCLSSRLRVSATFWQNPRNHFRCQVQFYGLSENDEWTQDRAKPVTQIVSAEAWGRADCGFTSESYQQGVLSATILYEILLGKATLYAVLVSALVLMAMVKRKDSRGRAKRSGSGATNFSLLKQAGDVEENPGPTSMDWIWRILFLVGAATGAHSFEQLQLQESGPGLVKPSETLSLTCTVSGGSISSGDYYWGWIRQPPGKGLEWIGHIYYSGATYYNPSLKSRVTISVDTSRNQFSLKLSSVTAADTAVYYCTRDDSSNWRSRGQGTLVTVSSTRIQNPDPAVYQLRDSKSSDKSVCLFTDFDSQTNVSQSKDSDVYITDKCVLDMRSMDFKSNSAVAWSNKSDFACANAFNNSIIPEDTFFPSPESSCDVKLVEKSFETDTNLNFQNLSVIGFRILLLKVAGFNLLMTLRLWSSRAKRSGSGVKQTLNFDLLKLAGDVESNPGPSRGHMTEYKPTVRLATRDDVPRAVRTLAAAFADYPATRHTVDPDRHIERVTELQELFLTRVGLDIGKVWVADDGAAVAVWTTPESVEAGAVFAEIGPRMAELSGSRLAAQQQMEGLLAPHRPKEPAWFLATVGVSPDHQGKGLGSAVVLPGVEAAERAGVPAFLETSAPRNLPFYERLGFTVTADVEVPEGPRTWCMTRKPGA

SEQ ID NO: 22809 - protein, 865 aa, Artificial Sequence
  Synthetic Polypeptide
MALPVTALLLPLALLLHAARPQVQLVESGGGLVQPGGSLRLSCAASGFTFTNHAMSWVRQAPGKGLELVSSISGNGRTTYYADSVKGRFTISRDISKNTLDLQMNSLRAEDTAVYYCAKDGGETLVDSRGQGTLVTVSSLEDLKNVFPPEVAVFEPSEAEISHTQKATLVCLATGFYPDHVELSWWVNGKEVHSGVCTDPQPLKEQPALNDSRYCLSSRLRVSATFWQNPRNHFRCQVQFYGLSENDEWTQDRAKPVTQIVSAEAWGRADCGFTSESYQQGVLSATILYEILLGKATLYAVLVSALVLMAMVKRKDSRGRAKRSGSGATNFSLLKQAGDVEENPGPTSMDWIWRILFLVGAATGAHSFEVQLLESGGGLVQPGGSLRLSCAASGFIFSSYAMSWVRQAPGKGQEWVSGVSGTGVNTYYADSVKGRFTISRDNSKNTLYLQMNSLRAEDTAVYYCASGKGWDSGSWYEDYRGQGTLVTVSSTRIQNPDPAVYQLRDSKSSDKSVCLFTDFDSQTNVSQSKDSDVYITDKCVLDMRSMDFKSNSAVAWSNKSDFACANAFNNSIIPEDTFFPSPESSCDVKLVEKSFETDTNLNFQNLSVIGFRILLLKVAGFNLLMTLRLWSSRAKRSGSGVKQTLNFDLLKLAGDVESNPGPSRGHMTEYKPTVRLATRDDVPRAVRTLAAAFADYPATRHTVDPDRHIERVTELQELFLTRVGLDIGKVWVADDGAAVAVWTTPESVEAGAVFAEIGPRMAELSGSRLAAQQQMEGLLAPHRPKEPAWFLATVGVSPDHQGKGLGSAVVLPGVEAAERAGVPAFLETSAPRNLPFYERLGFTVTADVEVPEGPRTWCMTRKPGA

SEQ ID NO: 22810 - protein, 865 aa, Artificial Sequence
  Synthetic Polypeptide
MALPVTALLLPLALLLHAARPQLQLQESGPGLVKPSETLSLTCTVSGDSISSGDYYWGWIRQPPGKGLEWIGHIYYSGVTYYNPSLKSRVTISVDTSRNQFSLKLSSVTAADTAVYYCTREDSSNWRSRGQGTLVTVSSLEDLKNVFPPEVAVFEPSEAEISHTQKATLVCLATGFYPDHVELSWWVNGKEVHSGVCTDPQPLKEQPALNDSRYCLSSRLRVSATFWQNPRNHFRCQVQFYGLSENDEWTQDRAKPVTQIVSAEAWGRADCGFTSESYQQGVLSATILYEILLGKATLYAVLVSALVLMAMVKRKDSRGRAKRSGSGATNFSLLKQAGDVEENPGPTSMDWIWRILFLVGAATGAHSFEVQLLESGGGLVQPGGSLRLSCAASGFIFSIYAMSWVRQAPGKGLEWVSGISGSGVNTYYADSVKGRFIISRDNSRNTVYLQMNSLRADDTAVYHCANGKGWDGNTWYEDYRGQGTLVTVSSTRIQNPDPAVYQLRDSKSSDKSVCLFTDFDSQTNVSQSKDSDVYITDKCVLDMRSMDFKSNSAVAWSNKSDFACANAFNNSIIPEDTFFPSPESSCDVKLVEKSFETDTNLNFQNLSVIGFRILLLKVAGFNLLMTLRLWSSRAKRSGSGVKQTLNFDLLKLAGDVESNPGPSRGHMTEYKPTVRLATRDDVPRAVRTLAAAFADYPATRHTVDPDRHIERVTELQELFLTRVGLDIGKVWVADDGAAVAVWTTPESVEAGAVFAEIGPRMAELSGSRLAAQQQMEGLLAPHRPKEPAWFLATVGVSPDHQGKGLGSAVVLPGVEAAERAGVPAFLETSAPRNLPFYERLGFTVTADVEVPEGPRTWCMTRKPGA

SEQ ID NO: 22811 - protein, 865 aa, Artificial Sequence
  Synthetic Polypeptide
MALPVTALLLPLALLLHAARPQVQLVESGGGLVQPGGSLRLSCAASGFTFTNHAMSWVRQAPGKGLELVSSISGNGRTTYYADSVKGRFTISRDISKNTLDLQMNSLRAEDTAVYYCAKDGGETLVDSRGQGTLVTVSSLEDLKNVFPPEVAVFEPSEAEISHTQKATLVCLATGFYPDHVELSWWVNGKEVHSGVCTDPQPLKEQPALNDSRYCLSSRLRVSATFWQNPRNHFRCQVQFYGLSENDEWTQDRAKPVTQIVSAEAWGRADCGFTSESYQQGVLSATILYEILLGKATLYAVLVSALVLMAMVKRKDSRGRAKRSGSGATNFSLLKQAGDVEENPGPTSMDWIWRILFLVGAATGAHSFEVQLLESGGGLVQPGGSLRLSCAASGFIFSIYAMSWVRQAPGKGLEWVSGISGSGVNTYYAHSVKGRFIISRDNSRNTVYLQMNSLRADDTAVYHCANGKGWDGNTWYEDYRGQGTLVTVSSTRIQNPDPAVYQLRDSKSSDKSVCLFTDFDSQTNVSQSKDSDVYITDKCVLDMRSMDFKSNSAVAWSNKSDFACANAFNNSIIPEDTFFPSPESSCDVKLVEKSFETDTNLNFQNLSVIGFRILLLKVAGFNLLMTLRLWSSRAKRSGSGVKQTLNFDLLKLAGDVESNPGPSRGHMTEYKPTVRLATRDDVPRAVRTLAAAFADYPATRHTVDPDRHIERVTELQELFLTRVGLDIGKVWVADDGAAVAVWTTPESVEAGAVFAEIGPRMAELSGSRLAAQQQMEGLLAPHRPKEPAWFLATVGVSPDHQGKGLGSAVVLPGVEAAERAGVPAFLETSAPRNLPFYERLGFTVTADVEVPEGPRTWCMTRKPGA

SEQ ID NO: 22812 - protein, 868 aa, Artificial Sequence
  Synthetic Polypeptide
MALPVTALLLPLALLLHAARPQLQLQESGPGLVKPSETLALTCNVSGGSISSSSYYWGWIRQPPGKRLEWIGSIYYSGSTYFNPSLKSRVTISVDTSKNQFSLKLSSVTAADTAVYYCAGGDYYGPVGQWPSDYRGQGTLVTVSSLEDLKNVFPPEVAVFEPSEAEISHTQKATLVCLATGFYPDHVELSWWVNGKEVHSGVCTDPQPLKEQPALNDSRYCLSSRLRVSATFWQNPRNHFRCQVQFYGLSENDEWTQDRAKPVTQIVSAEAWGRADCGFTSESYQQGVLSATILYEILLGKATLYAVLVSALVLMAMVKRKDSRGRAKRSGSGATNFSLLKQAGDVEENPGPTSMDWIWRILFLVGAATGAHSFEQVQLVESGGGLVQPGGSLRLSCAASGFTFTNHAMSWVRQAPGKGLELVSSISGNGRTTYYADSVKGRFTISRDISKNTLDLQMNSLRAEDTAVYYCAKDGGETLVDSRGQGTLVTVSSTRIQNPDPAVYQLRDSKSSDKSVCLFTDFDSQTNVSQSKDSDVYITDKCVLDMRSMDFKSNSAVAWSNKSDFACANAFNNSIIPEDTFFPSPESSCDVKLVEKSFETDTNLNFQNLSVIGFRILLLKVAGFNLLMTLRLWSSRAKRSGSGVKQTLNFDLLKLAGDVESNPGPSRGHMTEYKPTVRLATRDDVPRAVRTLAAAFADYPATRHTVDPDRHIERVTELQELFLTRVGLDIGKVWVADDGAAVAVWTTPESVEAGAVFAEIGPRMAELSGSRLAAQQQMEGLLAPHRPKEPAWFLATVGVSPDHQGKGLGSAVVLPGVEAAERAGVPAFLETSAPRNLPFYERLGFTVTADVEVPEGPRTWCMTRKPGA

SEQ ID NO: 22813 - protein, 866 aa, Artificial Sequence
  Synthetic Polypeptide
MDWIWRILFLVGAATGAHSQLQLQESGPGLVKPSETLSLTCTVSGGSVSSSSYYWGWIRQPPGKRLELIGSIYYGGSTYFNPSLKTRVTISVDTSKNQFSLKLSSVTAADTAVYYCAGGDTYGPVGQWPSDYRGQGTLVTVSSLEDLKNVFPPEVAVFEPSEAEISHTQKATLVCLATGFYPDHVELSWWVNGKEVHSGVCTDPQPLKEQPALNDSRYCLSSRLRVSATFWQNPRNHFRCQVQFYGLSENDEWTQDRAKPVTQIVSAEAWGRADCGFTSESYQQGVLSATILYEILLGKATLYAVLVSALVLMAMVKRKDSRGRAKRSGSGATNFSLLKQAGDVEENPGPTSMDWIWRILFLVGAATGAHSFEQVQLVESGGGLVQPGGSLRLSCAASGFTFTNHAMSWVRQAPGKGLELVSSISGNGRTTYYADSVKGRFTISRDISKNTLDLQMNSLRAEDTAVYYCAKDGGETLVDSRGQGTLVTVSSTRIQNPDPAVYQLRDSKSSDKSVCLFTDFDSQTNVSQSKDSDVYITDKCVLDMRSMDFKSNSAVAWSNKSDFACANAFNNSIIPEDTFFPSPESSCDVKLVEKSFETDTNLNFQNLSVIGFRILLLKVAGFNLLMTLRLWSSRAKRSGSGVKQTLNFDLLKLAGDVESNPGPSRGHMTEYKPTVRLATRDDVPRAVRTLAAAFADYPATRHTVDPDRHIERVTELQELFLTRVGLDIGKVWVADDGAAVAVWTTPESVEAGAVFAEIGPRMAELSGSRLAAQQQMEGLLAPHRPKEPAWFLATVGVSPDHQGKGLGSAVVLPGVEAAERAGVPAFLETSAPRNLPFYERLGFTVTADVEVPEGPRTWCMTRKPGA

SEQ ID NO: 22814 - protein, 911 aa, Artificial Sequence
  Synthetic Polypeptide
MALPVTALLLPLALLLHAARPLEGKPIPNPLLGLDSTGSGEDLKNVFPPEVAVFEPSKAEIAHTQKATLVCLATGFYPDHVELSWWVNGKEVHSGVCTDPQPLKEQPALNDSRYCLSSRLRVSATFWQNPRNHFRCQVQFYGLSENDEWTQDRAKPVTQIVSAEAWGRADCGITSASYHQGVLSATILYEILLGKATLYAVLVSALVLMAMVKRKDSRGRAKRSGSGATNFSLLKQAGDVEENPGPTSTMDWIWRILFLVGAATGAHSQLQLQESGPGLVKPSETLSLTCTVSGGSVSSSSYYWGWIRQPPGKRLELIGSIYYGGSTYFNPSLKSRVTISVDTSKNQFSLKLSSVTAADTAVYYCAGGDTYGPVGQWPSDYRGQGTLVTVSSGGGGSGGGSFEVQLLESGGGLVQPGGSLRLSCAASGFIFSIYAMSWVRQAPGKGLEWVSGISGSGVNTYYADSVKGRFIISRDNSRNTVYLQMNSLRADDTAVYHCANGKGWDGNTWYEDYRGQGTLVTVSSTREQKLISEEDGSGIQNPDPAVYQLRDSKSSDKSVCLFTDFDSQTNVSQSKDSDVYITDKCVLDMRSMDFKSNSAVAWSNKSDFACANAFNNSIIPEDTFFPSSDVPCDVKLVEKSFETDTNLNFQNLSVIGFRILLLKVAGFNLLMTLRLWSSRAKRSGSGVKQTLNFDLLKLAGDVESNPGPSRGHMTEYKPTVRLATRDDVPRAVRTLAAAFADYPATRHTVDPDRHIERVTELQELFLTRVGLDIGKVWVADDGAAVAVWTTPESVEAGAVFAEIGPRMAELSGSRLAAQQQMEGLLAPHRPKEPAWFLATVGVSPDHQGKGLGSAVVLPGVEAAERAGVPAFLETSAPRNLPFYERLGFTVTADVEVPEGPRTWCMTRKPGA

SEQ ID NO: 22815 - protein, 916 aa, Artificial Sequence
  Synthetic Polypeptide
MALPVTALLLPLALLLHAARPLEGKPIPNPLLGLDSTGSGEDLKNVFPPEVAVFEPSKAEIAHTQKATLVCLATGFYPDHVELSWWVNGKEVHSGVCTDPQPLKEQPALNDSRYCLSSRLRVSATFWQNPRNHFRCQVQFYGLSENDEWTQDRAKPVTQIVSAEAWGRADCGITSASYHQGVLSATILYEILLGKATLYAVLVSALVLMAMVKRKDSRGRAKRSGSGATNFSLLKQAGDVEENPGPTSTMALPVTALLLPLALLLHAARPQLQLQESGPGLVKPSETLALTCNVSGGSISSSSYYWGWIRQPPGKRLEWIGSIYYSGSTYFNPSLKSRVTISVDTSKNQFSLKLSSVTAADTAVYYCAGGDYYGPVGQWPSDYRGQGTLVTVSSGSGGGGSGGGGSFEVQLLESGGGLVQPGGSLRLSCAASGFIFSSYAMSWVRQAPGKGQEWVSGVSGTGVNTYYADSVKGRFTISRDNSKNTLYLQMNSLRAEDTAVYYCASGKGWDSGSWYEDYRGQGTLVTVSSTREQKLISEEDGSGIQNPDPAVYQLRDSKSSDKSVCLFTDFDSQTNVSQSKDSDVYITDKCVLDMRSMDFKSNSAVAWSNKSDFACANAFNNSIIPEDTFFPSSDVPCDVKLVEKSFETDTNLNFQNLSVIGFRILLLKVAGFNLLMTLRLWSSRAKRSGSGVKQTLNFDLLKLAGDVESNPGPSRGHMTEYKPTVRLATRDDVPRAVRTLAAAFADYPATRHTVDPDRHIERVTELQELFLTRVGLDIGKVWVADDGAAVAVWTTPESVEAGAVFAEIGPRMAELSGSRLAAQQQMEGLLAPHRPKEPAWFLATVGVSPDHQGKGLGSAVVLPGVEAAERAGVPAFLETSAPRNLPFYERLGFTVTADVEVPEGPRTWCMTRKPGA

SEQ ID NO: 22816 - protein, 870 aa, Artificial Sequence
  Synthetic Polypeptide
MALPVTALLLPLALLLHAARPQLQLQESGPGLVKPSETLSLTCTVSGDSISSGDYYWGWIRQPPGKGLEWIGHIYYSGVTYYNPSLKSRVTISVDTSRNQFSLKLSSVTAADTAVYYCTREDSSNWRSRGQGTLVTVSSLEPGGGGSPEDLKNVFPPEVAVFEPSEAEISHTQKATLVCLATGFYPDHVELSWWVNGKEVHSGVCTDPQPLKEQPALNDSRYCLSSRLRVSATFWQNPRNHFRCQVQFYGLSENDEWTQDRAKPVTQIVSAEAWGRADCGFTSESYQQGVLSATILYEILLGKATLYAVLVSALVLMAMVKRKDSRGRAKRSGSGATNFSLLKQAGDVEENPGPTSMDWIWRILFLVGAATGAHSFEVQLLESGGGLIQPGGSLRLSCAASGFTFSSHAMTWVRQAPGKGLEWVSAISGSGDYTHYADSVKGRFTISRDNSKNTVYLQMNSLRAEDSAVYYCAKDEDGGSLLGHRGQGTLVTVSSTRIQNPDPAVYQLRDSKSSDKSVCLFTDFDSQTNVSQSKDSDVYITDKCVLDMRSMDFKSNSAVAWSNKSDFACANAFNNSIIPEDTFFPSPESSCDVKLVEKSFETDTNLNFQNLSVIGFRILLLKVAGFNLLMTLRLWSSRAKRSGSGVKQTLNFDLLKLAGDVESNPGPSRGHMTEYKPTVRLATRDDVPRAVRTLAAAFADYPATRHTVDPDRHIERVTELQELFLTRVGLDIGKVWVADDGAAVAVWTTPESVEAGAVFAEIGPRMAELSGSRLAAQQQMEGLLAPHRPKEPAWFLATVGVSPDHQGKGLGSAVVLPGVEAAERAGVPAFLETSAPRNLPFYERLGFTVTADVEVPEGPRTWCMTRKPGA

SEQ ID NO: 22817 - protein, 775 aa, Artificial Sequence
  Synthetic Polypeptide
MALPVTALLLPLALLLHAARPLEGKPIPNPLLGLDSTGSGEDLKNVFPPEVAVFEPSKAEIAHTQKATLVCLATGFYPDHVELSWWVNGKEVHSGVCTDPQPLKEQPALNDSRYCLSSRLRVSATFWQNPRNHFRCQVQFYGLSENDEWTQDRAKPVTQIVSAEAWGRADCGITSASYHQGVLSATILYEILLGKATLYAVLVSALVLMAMVKRKDSRGRAKRSGSGATNFSLLKQAGDVEENPGPTSTMALPVTALLLPLALLLHAARPQVQLVESGGGLVQPGGSLRLSCAASGFTFTNHAMSWVRQAPGKGLELVSSISGNGRTTYYADSVKGRFTISRDISKNTLDLQMNSLRAEDTAVYYCAKDGGETLVDSRGQGTLVTVSSTREQKLISEEDGSGIQNPDPAVYQLRDSKSSDKSVCLFTDFDSQTNVSQSKDSDVYITDKCVLDMRSMDFKSNSAVAWSNKSDFACANAFNNSIIPEDTFFPSSDVPCDVKLVEKSFETDTNLNFQNLSVIGFRILLLKVAGFNLLMTLRLWSSRAKRSGSGVKQTLNFDLLKLAGDVESNPGPSRGHMTEYKPTVRLATRDDVPRAVRTLAAAFADYPATRHTVDPDRHIERVTELQELFLTRVGLDIGKVWVADDGAAVAVWTTPESVEAGAVFAEIGPRMAELSGSRLAAQQQMEGLLAPHRPKEPAWFLATVGVSPDHQGKGLGSAVVLPGVEAAERAGVPAFLETSAPRNLPFYERLGFTVTADVEVPEGPRTWCMTRKPGA

SEQ ID NO: 22818 - protein, 906 aa, Artificial Sequence
  Synthetic Polypeptide
MALPVTALLLPLALLLHAARPLEGKPIPNPLLGLDSTGSGEDLKNVFPPEVAVFEPSKAEIAHTQKATLVCLATGFYPDHVELSWWVNGKEVHSGVCTDPQPLKEQPALNDSRYCLSSRLRVSATFWQNPRNHFRCQVQFYGLSENDEWTQDRAKPVTQIVSAEAWGRADCGITSASYHQGVLSATILYEILLGKATLYAVLVSALVLMAMVKRKDSRGRAKRSGSGATNFSLLKQAGDVEENPGPTSTMALPVTALLLPLALLLHAARPQLQLQESGPGLVKPSETLSLTCTVSGDSISSGDYYWGWIRQPPGKGLEWIGHIYYSGVTYYNPSLKSRVTISVDTSRNQFSLKLSSVTAADTAVYYCTREDSSNWRSRGQGTLVTVSSLESGGGGSFEEVQLLESGGGLVQPGGSLRLSCAASGFTFSSYAMSWVRQAPGKGLEWVSSISGSGDYIYYADSVKGRFTISRDISKNTLYLQMNSLRAEDTAVYYCAKEGTGANSSLADYRGQGTLVTVSSTREQKLISEEDGSGIQNPDPAVYQLRDSKSSDKSVCLFTDFDSQTNVSQSKDSDVYITDKCVLDMRSMDFKSNSAVAWSNKSDFACANAFNNSIIPEDTFFPSSDVPCDVKLVEKSFETDTNLNFQNLSVIGFRILLLKVAGFNLLMTLRLWSSRAKRSGSGVKQTLNFDLLKLAGDVESNPGPSRGHMTEYKPTVRLATRDDVPRAVRTLAAAFADYPATRHTVDPDRHIERVTELQELFLTRVGLDIGKVWVADDGAAVAVWTTPESVEAGAVFAEIGPRMAELSGSRLAAQQQMEGLLAPHRPKEPAWFLATVGVSPDHQGKGLGSAVVLPGVEAAERAGVPAFLETSAPRNLPFYERLGFTVTADVEVPEGPRTWCMTRKPGA

SEQ ID NO: 22819 - protein, 903 aa, Artificial Sequence
  Synthetic Polypeptide
MALPVTALLLPLALLLHAARPLEGKPIPNPLLGLDSTGSGEDLKNVFPPEVAVFEPSKAEIAHTQKATLVCLATGFYPDHVELSWWVNGKEVHSGVCTDPQPLKEQPALNDSRYCLSSRLRVSATFWQNPRNHFRCQVQFYGLSENDEWTQDRAKPVTQIVSAEAWGRADCGITSASYHQGVLSATILYEILLGKATLYAVLVSALVLMAMVKRKDSRGRAKRSGSGATNFSLLKQAGDVEENPGPTSTMALPVTALLLPLALLLHAARPQLQLQESGPGLVKPSETLSLTCTVSGDSISSGDYYWGWIRQPPGKGLEWIGHIYYSGVTYYNPSLKSRVTISVDTSRNQFSLKLSSVTAADTAVYYCTREDSSNWRSRGQGTLVTVSSLESGGGGSFEQVQLVESGGGLVQPGGSLRLSCAASGFTFTNHAMSWVRQAPGKGLELVSSISGNGRTTYYADSVKGRFTISRDISKNTLDLQMNSLRAEDTAVYYCAKDGGETLVDSRGQGTLVTVSSTREQKLISEEDGSGIQNPDPAVYQLRDSKSSDKSVCLFTDFDSQTNVSQSKDSDVYITDKCVLDMRSMDFKSNSAVAWSNKSDFACANAFNNSIIPEDTFFPSSDVPCDVKLVEKSFETDTNLNFQNLSVIGFRILLLKVAGFNLLMTLRLWSSRAKRSGSGVKQTLNFDLLKLAGDVESNPGPSRGHMTEYKPTVRLATRDDVPRAVRTLAAAFADYPATRHTVDPDRHIERVTELQELFLTRVGLDIGKVWVADDGAAVAVWTTPESVEAGAVFAEIGPRMAELSGSRLAAQQQMEGLLAPHRPKEPAWFLATVGVSPDHQGKGLGSAVVLPGVEAAERAGVPAFLETSAPRNLPFYERLGFTVTADVEVPEGPRTWCMTRKPGA

SEQ ID NO: 22820 - protein, 776 aa, Artificial Sequence
  Synthetic Polypeptide
MALPVTALLLPLALLLHAARPLEGKPIPNPLLGLDSTGSGEDLKNVFPPEVAVFEPSKAEIAHTQKATLVCLATGFYPDHVELSWWVNGKEVHSGVCTDPQPLKEQPALNDSRYCLSSRLRVSATFWQNPRNHFRCQVQFYGLSENDEWTQDRAKPVTQIVSAEAWGRADCGITSASYHQGVLSATILYEILLGKATLYAVLVSALVLMAMVKRKDSRGRAKRSGSGATNFSLLKQAGDVEENPGPTSTMALPVTALLLPLALLLHAARPEVQLVESGGGLVQPGGSLRLSCAASGFNIKDTCIGWVRRAPGKEEELVAKICKYSGHTRYADSVKGRFTISADTSKNTAYLQMNSLRAEDTAVYYCAAVSVRDGHYNYWGQGTTVTVSSTREQKLISEEDGSGIQNPDPAVYQLRDSKSSDKSVCLFTDFDSQTNVSQSKDSDVYITDKCVLDMRSMDFKSNSAVAWSNKSDFACANAFNNSIIPEDTFFPSSDVPCDVKLVEKSFETDTNLNFQNLSVIGFRILLLKVAGFNLLMTLRLWSSRAKRSGSGVKQTLNFDLLKLAGDVESNPGPSRGHMTEYKPTVRLATRDDVPRAVRTLAAAFADYPATRHTVDPDRHIERVTELQELFLTRVGLDIGKVWVADDGAAVAVWTTPESVEAGAVFAEIGPRMAELSGSRLAAQQQMEGLLAPHRPKEPAWFLATVGVSPDHQGKGLGSAVVLPGVEAAERAGVPAFLETSAPRNLPFYERLGFTVTADVEVPEGPRTWCMTRKPGA

SEQ ID NO: 22821 - protein, 777 aa, Artificial Sequence
  Synthetic Polypeptide
MALPVTALLLPLALLLHAARPLEGKPIPNPLLGLDSTGSGEDLKNVFPPEVAVFEPSKAEIAHTQKATLVCLATGFYPDHVELSWWVNGKEVHSGVCTDPQPLKEQPALNDSRYCLSSRLRVSATFWQNPRNHFRCQVQFYGLSENDEWTQDRAKPVTQIVSAEAWGRADCGITSASYHQGVLSATILYEILLGKATLYAVLVSALVLMAMVKRKDSRGRAKRSGSGATNFSLLKQAGDVEENPGPTSTMALPVTALLLPLALLLHAARPEVQLVESGGGLVQPGGSLRLSCTFSGGTFSSYTMGWFRQAPGKEREFVAEVRWGGVTTYSNSLKDRFSISEDSVKNAVYLQMNSLKPEDTAVYYCAAVRQMYMTVVPDYWGQGTLVTVSSTREQKLISEEDGSGIQNPDPAVYQLRDSKSSDKSVCLFTDFDSQTNVSQSKDSDVYITDKCVLDMRSMDFKSNSAVAWSNKSDFACANAFNNSIIPEDTFFPSSDVPCDVKLVEKSFETDTNLNFQNLSVIGFRILLLKVAGFNLLMTLRLWSSRAKRSGSGVKQTLNFDLLKLAGDVESNPGPSRGHMTEYKPTVRLATRDDVPRAVRTLAAAFADYPATRHTVDPDRHIERVTELQELFLTRVGLDIGKVWVADDGAAVAVWTTPESVEAGAVFAEIGPRMAELSGSRLAAQQQMEGLLAPHRPKEPAWFLATVGVSPDHQGKGLGSAVVLPGVEAAERAGVPAFLETSAPRNLPFYERLGFTVTADVEVPEGPRTWCMTRKPGA

SEQ ID NO: 22822 - protein, 862 aa, Artificial Sequence
  Synthetic Polypeptide
MALPVTALLLPLALLLHAARPQLQLQESGPGLVKPSETLSLTCTVSGDSISSGDYYWGWIRQPPGKGLEWIGHIYYSGVTYYNPSLKSRVTISVDTSRNQFSLKLSSVTAADTAVYYCTREDSSNWRSRGQGTLVTVSSLEDLKNVFPPEVAVFEPSEAEISHTQKATLVCLATGFYPDHVELSWWVNGKEVHSGVCTDPQPLKEQPALNDSRYCLSSRLRVSATFWQNPRNHFRCQVQFYGLSENDEWTQDRAKPVTQIVSAEAWGRADCGFTSESYQQGVLSATILYEILLGKATLYAVLVSALVLMAMVKRKDSRGRAKRSGSGATNFSLLKQAGDVEENPGPTSMDWIWRILFLVGAATGAHSFEVQLVESGGGLVQPGGSLRLSCAASGFNIKDTCIGWVRRAPGKEEELVADICPYKGSTRYADSVKGRFTISADTSKNTAYLQMNSLRAEDTAVYYCAIVSARDGYYNYWGQGTTVTVSSTRIQNPDPAVYQLRDSKSSDKSVCLFTDFDSQTNVSQSKDSDVYITDKCVLDMRSMDFKSNSAVAWSNKSDFACANAFNNSIIPEDTFFPSPESSCDVKLVEKSFETDTNLNFQNLSVIGFRILLLKVAGFNLLMTLRLWSSRAKRSGSGVKQTLNFDLLKLAGDVESNPGPSRGHMTEYKPTVRLATRDDVPRAVRTLAAAFADYPATRHTVDPDRHIERVTELQELFLTRVGLDIGKVWVADDGAAVAVWTTPESVEAGAVFAEIGPRMAELSGSRLAAQQQMEGLLAPHRPKEPAWFLATVGVSPDHQGKGLGSAVVLPGVEAAERAGVPAFLETSAPRNLPFYERLGFTVTADVEVPEGPRTWCMTRKPGA

SEQ ID NO: 22823 - protein, 865 aa, Artificial Sequence
  Synthetic Polypeptide
MALPVTALLLPLALLLHAARPQLQLQESGPGLVKPSETLSLTCTVSGDSISSGDYYWGWIRQPPGKGLEWIGHIYYSGVTYYNPSLKSRVTISVDTSRNQFSLKLSSVTAADTAVYYCTREDSSNWRSRGQGTLVTVSSLEDLKNVFPPEVAVFEPSEAEISHTQKATLVCLATGFYPDHVELSWWVNGKEVHSGVCTDPQPLKEQPALNDSRYCLSSRLRVSATFWQNPRNHFRCQVQFYGLSENDEWTQDRAKPVTQIVSAEAWGRADCGFTSESYQQGVLSATILYEILLGKATLYAVLVSALVLMAMVKRKDSRGRAKRSGSGATNFSLLKQAGDVEENPGPTSMDWIWRILFLVGAATGAHSFEVQLLESGGGLVQPGGSLRLSCAASGFIFSSYAMSWVRQAPGKGQEWVSGVSGTGVNTYYADSVKGRFTISRDNSKNTLYLQMNSLRAEDTAVYYCASGKGWDSGSWYEDYRGQGTLVTVSSTRIQNPDPAVYQLRDSKSSDKSVCLFTDFDSQTNVSQSKDSDVYITDKCVLDMRSMDFKSNSAVAWSNKSDFACANAFNNSIIPEDTFFPSPESSCDVKLVEKSFETDTNLNFQNLSVIGFRILLLKVAGFNLLMTLRLWSSRAKRSGSGVKQTLNFDLLKLAGDVESNPGPSRGHMTEYKPTVRLATRDDVPRAVRTLAAAFADYPATRHTVDPDRHIERVTELQELFLTRVGLDIGKVWVADDGAAVAVWTTPESVEAGAVFAEIGPRMAELSGSRLAAQQQMEGLLAPHRPKEPAWFLATVGVSPDHQGKGLGSAVVLPGVEAAERAGVPAFLETSAPRNLPFYERLGFTVTADVEVPEGPRTWCMTRKPGA

SEQ ID NO: 22824 - protein, 911 aa, Artificial Sequence; identical to SEQ ID NO: 22814
  Synthetic Polypeptide

SEQ ID NO: 22825 - protein, 916 aa, Artificial Sequence; identical to SEQ ID NO: 22815
  Synthetic Polypeptide

SEQ ID NO: 22826 - protein, 862 aa, Artificial Sequence; identical to SEQ ID NO: 22808
  Synthetic Polypeptide

SEQ ID NO: 22827 - protein, 866 aa, Artificial Sequence
  Synthetic Polypeptide
MDWIWRILFLVGAATGAHSQLQLQESGPGLVKPSETLSLTCTVSGGSVSSSSYYWGWIRQPPGKRLELIGSIYYGGSTYFNPSLKTRVTISVDTSKNQFSLKLSSVTAADTAVYYCAGGDTYGPVGQWPSDYRGQGTLVTVSSLEDLKNVFPPEVAVFEPSEAEISHTQKATLVCLATGFYPDHVELSWWVNGKEVHSGVCTDPQPLKEQPALNDSRYCLSSRLRVSATFWQNPRNHFRCQVQFYGLSENDEWTQDRAKPVTQIVSAEAWGRADCGFTSESYQQGVLSATILYEILLGKATLYAVLVSALVLMAMVKRKDSRGRAKRSGSGATNFSLLKQAGDVEENPGPTSMDWIWRILFLVGAATGAHSFEVQLLESGGGLIQPGGSLRLSCAASGFTFSSHAMTWVRQAPGKGLEWVSAISGSGDYTHYADSVKGRFTISRDNSKNTVYLQMNSLRAEDSAVYYCAKDEDGGSLLGHRGQGTLVTVSSTRIQNPDPAVYQLRDSKSSDKSVCLFTDFDSQTNVSQSKDSDVYITDKCVLDMRSMDFKSNSAVAWSNKSDFACANAFNNSIIPEDTFFPSPESSCDVKLVEKSFETDTNLNFQNLSVIGFRILLLKVAGFNLLMTLRLWSSRAKRSGSGVKQTLNFDLLKLAGDVESNPGPSRGHMTEYKPTVRLATRDDVPRAVRTLAAAFADYPATRHTVDPDRHIERVTELQELFLTRVGLDIGKVWVADDGAAVAVWTTPESVEAGAVFAEIGPRMAELSGSRLAAQQQMEGLLAPHRPKEPAWFLATVGVSPDHQGKGLGSAVVLPGVEAAERAGVPAFLETSAPRNLPFYERLGFTVTADVEVPEGPRTWCMTRKPGA

SEQ ID NO: 22828 - protein, 868 aa, Artificial Sequence
  Synthetic Polypeptide
MALPVTALLLPLALLLHAARPQLQLQESGPGLVKPSETLSLTCTVSGDSISSGDYYWGWIRQPPGKGLEWIGHIYYSGVTYYNPSLKSRVTISVDTSRNQFSLKLSSVTAADTAVYYCTREDSSNWRSRGQGTLVTVSSLEDLKNVFPPEVAVFEPSEAEISHTQKATLVCLATGFYPDHVELSWWVNGKEVHSGVCTDPQPLKEQPALNDSRYCLSSRLRVSATFWQNPRNHFRCQVQFYGLSENDEWTQDRAKPVTQIVSAEAWGRADCGFTSESYQQGVLSATILYEILLGKATLYAVLVSALVLMAMVKRKDSRGRAKRSGSGATNFSLLKQAGDVEENPGPTSMDWIWRILFLVGAATGAHSFEQLQLQESGPGLVKPSETLALTCNVSGGSISSSSYYWGWIRQPPGKRLEWIGSIYYSGSTYFNPSLKSRVTISVDTSKNQFSLKLSSVTAADTAVYYCAGGDYYGPVGQWPSDYRGQGTLVTVSSTRIQNPDPAVYQLRDSKSSDKSVCLFTDFDSQTNVSQSKDSDVYITDKCVLDMRSMDFKSNSAVAWSNKSDFACANAFNNSIIPEDTFFPSPESSCDVKLVEKSFETDTNLNFQNLSVIGFRILLLKVAGFNLLMTLRLWSSRAKRSGSGVKQTLNFDLLKLAGDVESNPGPSRGHMTEYKPTVRLATRDDVPRAVRTLAAAFADYPATRHTVDPDRHIERVTELQELFLTRVGLDIGKVWVADDGAAVAVWTTPESVEAGAVFAEIGPRMAELSGSRLAAQQQMEGLLAPHRPKEPAWFLATVGVSPDHQGKGLGSAVVLPGVEAAERAGVPAFLETSAPRNLPFYERLGFTVTADVEVPEGPRTWCMTRKPGA

SEQ ID NO: 22829 - protein, 865 aa, Artificial Sequence
  Synthetic Polypeptide
MALPVTALLLPLALLLHAARPQVQLVESGGGLVQPGGSLRLSCAASGFTFTNHAMSWVRQAPGKGLELVSSISGNGRTTYYADSVKGRFTISRDISKNTLDLQMNSLRAEDTAVYYCAKDGGETLVDSRGQGTLVTVSSLEDLKNVFPPEVAVFEPSEAEISHTQKATLVCLATGFYPDHVELSWWVNGKEVHSGVCTDPQPLKEQPALNDSRYCLSSRLRVSATFWQNPRNHFRCQVQFYGLSENDEWTQDRAKPVTQIVSAEAWGRADCGFTSESYQQGVLSATILYEILLGKATLYAVLVSALVLMAMVKRKDSRGRAKRSGSGATNFSLLKQAGDVEENPGPTSMDWIWRILFLVGAATGAHSFEVQLLESGGGLVQPGGSLRLSCAASGFIFSIYAMSWVRQAPGKGLEWVSGISGSGVNTYYADSVKGRFIISRDNSRNTVYLQMNSLRADDTAVYHCANGKGWDGNTWYEDYRGQGTLVTVSSTRIQNPDPAVYQLRDSKSSDKSVCLFTDFDSQTNVSQSKDSDVYITDKCVLDMRSMDFKSNSAVAWSNKSDFACANAFNNSIIPEDTFFPSPESSCDVKLVEKSFETDTNLNFQNLSVIGFRILLLKVAGFNLLMTLRLWSSRAKRSGSGVKQTLNFDLLKLAGDVESNPGPSRGHMTEYKPTVRLATRDDVPRAVRTLAAAFADYPATRHTVDPDRHIERVTELQELFLTRVGLDIGKVWVADDGAAVAVWTTPESVEAGAVFAEIGPRMAELSGSRLAAQQQMEGLLAPHRPKEPAWFLATVGVSPDHQGKGLGSAVVLPGVEAAERAGVPAFLETSAPRNLPFYERLGFTVTADVEVPEGPRTWCMTRKPGA

SEQ ID NO: 22830 - protein, 866 aa, Artificial Sequence; identical to SEQ ID NO: 22813
  Synthetic Polypeptide

SEQ ID NO: 22831 - protein, 866 aa, Artificial Sequence; identical to SEQ ID NO: 22813
  Synthetic Polypeptide

SEQ ID NO: 22832 - protein, 996 aa, Artificial Sequence
  Synthetic Polypeptide
MALPVTALLLPLALLLHAARPQLQLQESGPGLVKPSETLSLTCTVSGDSISSGDYYWGWIRQPPGKGLEWIGHIYYSGVTYYNPSLKSRVTISVDTSRNQFSLKLSSVTAADTAVYYCTREDSSNWRSRGQGTLVTVSSLEDLKNVFPPEVAVFEPSEAEISHTQKATLVCLATGFYPDHVELSWWVNGKEVHSGVCTDPQPLKEQPALNDSRYCLSSRLRVSATFWQNPRNHFRCQVQFYGLSENDEWTQDRAKPVTQIVSAEAWGRADCGFTSESYQQGVLSATILYEILLGKATLYAVLVSALVLMAMVKRKDSRGRAKRSGSGATNFSLLKQAGDVEENPGPTSTMDWIWRILFLVGAATGAHSEVQLLESGGGLVQPGGSLRLSCAASGFSFSSYALSWVRQAPGKGLEWVSSIGENDGTTDYADAVKGRFTISRDNSKNTLYLQMNSLRVEDTAVYYCVKDGVHWGQGTLVTVSSGSGGGGSGGGGSFEVQLVESGGGVVQPGRSLRLSCAASGFSFSGYGMHWVRQAPGKGLEWVAYISYDGSNKYYADSVKGRFTISRDNSKNTLYLQMNSLRAEDTAVYYCAKDPAWGLRLGESSSYDFDIWGQGTMVTVSSTRIQNPDPAVYQLRDSKSSDKSVCLFTDFDSQTNVSQSKDSDVYITDKCVLDMRSMDFKSNSAVAWSNKSDFACANAFNNSIIPEDTFFPSPESSCDVKLVEKSFETDTNLNFQNLSVIGFRILLLKVAGFNLLMTLRLWSSRAKRSGSGVKQTLNFDLLKLAGDVESNPGPSRGHMTEYKPTVRLATRDDVPRAVRTLAAAFADYPATRHTVDPDRHIERVTELQELFLTRVGLDIGKVWVADDGAAVAVWTTPESVEAGAVFAEIGPRMAELSGSRLAAQQQMEGLLAPHRPKEPAWFLATVGVSPDHQGKGLGSAVVLPGVEAAERAGVPAFLETSAPRNLPFYERLGFTVTADVEVPEGPRTWCMTRKPGA

SEQ ID NO: 22833 - protein, 1027 aa, Artificial Sequence
  Synthetic Polypeptide
MALPVTALLLPLALLLHAARPEVQLVESGGGLVQPGGSLRLSCAASGFNIKDTCIGWVRRAPGKEEELVAKICKYSGHTRYADSVKGRFTISADTSKNTAYLQMNSLRAEDTAVYYCAAVSVRDGHYNYWGQGTTVTVSSLEGKPIPNPLLGLDSTGSGEDLKNVFPPEVAVFEPSKAEIAHTQKATLVCLATGFYPDHVELSWWVNGKEVHSGVCTDPQPLKEQPALNDSRYCLSSRLRVSATFWQNPRNHFRCQVQFYGLSENDEWTQDRAKPVTQIVSAEAWGRADCGITSASYHQGVLSATILYEILLGKATLYAVLVSALVLMAMVKRKDSRGRAKRSGSGATNFSLLKQAGDVEENPGPTSTMDWIWRILFLVGAATGAHSEVQLLESGGGLVQPGGSLRLSCAASGFSFSSYALSWVRQAPGKGLEWVSSIGENDGTTDYADAVKGRFTISRDNSKNTLYLQMNSLRVEDTAVYYCVKDGVHWGQGTLVTVSSGSGGGGSGGGGSFEVQLVESGGGVVQPGRSLRLSCAASGFSFSGYGMHWVRQAPGKGLEWVAYISYDGSNKYYADSVKGRFTISRDNSKNTLYLQMNSLRAEDTAVYYCAKDPAWGLRLGESSSYDFDIWGQGTMVTVSSTREQKLISEEDGSGIQNPDPAVYQLRDSKSSDKSVCLFTDFDSQTNVSQSKDSDVYITDKCVLDMRSMDFKSNSAVAWSNKSDFACANAFNNSIIPEDTFFPSSDVPCDVKLVEKSFETDTNLNFQNLSVIGFRILLLKVAGFNLLMTLRLWSSRAKRSGSGVKQTLNFDLLKLAGDVESNPGPSRGHMTEYKPTVRLATRDDVPRAVRTLAAAFADYPATRHTVDPDRHIERVTELQELFLTRVGLDIGKVWVADDGAAVAVWTTPESVEAGAVFAEIGPRMAELSGSRLAAQQQMEGLLAPHRPKEPAWFLATVGVSPDHQGKGLGSAVVLPGVEAAERAGVPAFLETSAPRNLPFYERLGFTVTADVEVPEGPRTWCMTRKPGA

SEQ ID NO: 22834 - protein, 903 aa, Artificial Sequence
  Synthetic Polypeptide
MALPVTALLLPLALLLHAARPLEGKPIPNPLLGLDSTGSGEDLKNVFPPEVAVFEPSKAEIAHTQKATLVCLATGFYPDHVELSWWVNGKEVHSGVCTDPQPLKEQPALNDSRYCLSSRLRVSATFWQNPRNHFRCQVQFYGLSENDEWTQDRAKPVTQIVSAEAWGRADCGITSASYHQGVLSATILYEILLGKATLYAVLVSALVLMAMVKRKDSRGRAKRSGSGATNFSLLKQAGDVEENPGPTSTMALPVTALLLPLALLLHAARPQLQLQESGPGLVKPSETLSLTCTVSGDSISSGDYYWGWIRQPPGKGLEWIGHIYYSGVTYYNPSLKSRVTISVDTSRNQFSLKLSSVTAADTAVYYCTREDSSNWRSRGQGTLVTVSSLESGGGGSFEVQLLESGGGLIQPGGSLRLSCAASGFTFSSHAMTWVRQAPGKGLEWVSAISGSGDYTHYADSVKGRFTISRDNSKNTVYLQMNSLRAEDSAVYYCAKDEDGGSLLGHRGQGTLVTVSSTREQKLISEEDGSGIQNPDPAVYQLRDSKSSDKSVCLFTDFDSQTNVSQSKDSDVYITDKCVLDMRSMDFKSNSAVAWSNKSDFACANAFNNSIIPEDTFFPSSDVPCDVKLVEKSFETDTNLNFQNLSVIGFRILLLKVAGFNLLMTLRLWSSRAKRSGSGVKQTLNFDLLKLAGDVESNPGPSRGHMTEYKPTVRLATRDDVPRAVRTLAAAFADYPATRHTVDPDRHIERVTELQELFLTRVGLDIGKVWVADDGAAVAVWTTPESVEAGAVFAEIGPRMAELSGSRLAAQQQMEGLLAPHRPKEPAWFLATVGVSPDHQGKGLGSAVVLPGVEAAERAGVPAFLETSAPRNLPFYERLGFTVTADVEVPEGPRTWCMTRKPGA

SEQ ID NO: 22835 - protein, 642 aa, Artificial Sequence
  Synthetic Polypeptide
MALPVTALLLPLALLLHAARPQLQLQESGPGLVKPSETLSLTCTVSGDSISSGDYYWGWIRQPPGKGLEWIGHIYYSGVTYYNPSLKSRVTISVDTSRNQFSLKLSSVTAADTAVYYCTREDSSNWRSRGQGTLVTVSSLDSGGGGSFEQLQLQESGPGLVKPSETLSLTCTVSGGSISSGDYYWGWIRQPPGKGLEWIGHIYYSGATYYNPSLKSRVTISVDTSRNQFSLKLSSVTAADTAVYYCTRDDSSNWRSRGQGTLVTVSSTRIQNPDPAVYQLRDSKSSDKSVCLFTDFDSQTNVSQSKDSDVYITDKCVLDMRSMDFKSNSAVAWSNKSDFACANAFNNSIIPEDTFFPSPESSCDVKLVEKSFETDTNLNFQNLSVIGFRILLLKVAGFNLLMTLRLWSSRAKRSGSGVKQTLNFDLLKLAGDVESNPGPSRGHMTEYKPTVRLATRDDVPRAVRTLAAAFADYPATRHTVDPDRHIERVTELQELFLTRVGLDIGKVWVADDGAAVAVWTTPESVEAGAVFAEIGPRMAELSGSRLAAQQQMEGLLAPHRPKEPAWFLATVGVSPDHQGKGLGSAVVLPGVEAAERAGVPAFLETSAPRNLPFYERLGFTVTADVEVPEGPRTWCMTRKPGA

SEQ ID NO: 22836 - protein, 645 aa, Artificial Sequence
  Synthetic Polypeptide
MALPVTALLLPLALLLHAARPQLQLQESGPGLVKPSETLSLTCTVSGDSISSGDYYWGWIRQPPGKGLEWIGHIYYSGVTYYNPSLKSRVTISVDTSRNQFSLKLSSVTAADTAVYYCTREDSSNWRSRGQGTLVTVSSLESGGGGSFEEVQLLESGGGLVQPGGSLRLSCAASGFTFSSYAMSWVRQAPGKGLEWVSSISGSGDYIYYADSVKGRFTISRDISKNTLYLQMNSLRAEDTAVYYCAKEGTGANSSLADYRGQGTLVTVSSTRIQNPDPAVYQLRDSKSSDKSVCLFTDFDSQTNVSQSKDSDVYITDKCVLDMRSMDFKSNSAVAWSNKSDFACANAFNNSIIPEDTFFPSPESSCDVKLVEKSFETDTNLNFQNLSVIGFRILLLKVAGFNLLMTLRLWSSRAKRSGSGVKQTLNFDLLKLAGDVESNPGPSRGHMTEYKPTVRLATRDDVPRAVRTLAAAFADYPATRHTVDPDRHIERVTELQELFLTRVGLDIGKVWVADDGAAVAVWTTPESVEAGAVFAEIGPRMAELSGSRLAAQQQMEGLLAPHRPKEPAWFLATVGVSPDHQGKGLGSAVVLPGVEAAERAGVPAFLETSAPRNLPFYERLGFTVTADVEVPEGPRTWCMTRKPGA

SEQ ID NO: 22837 - protein, 654 aa, Artificial Sequence
  Synthetic Polypeptide
MALPVTALLLPLALLLHAARPEVQLVESGGGVVQPGRSLRLSCAASGFSFSGYGMHWVRQAPGKGLEWVAYISYDGSNKYYADSVKGRFTISRDNSKNTLYLQMNSLRAEDTAVYYCAKDPAWGLRLGESSSYDFDIWGQGTMVTVSSGSGGGGSGGGGSGGGGSFEVQLLESGGGLVQPGGSLRLSCAASGFSFSSYALSWVRQAPGKGLEWVSSIGENDGTTDYADAVKGRFTISRDNSKNTLYLQMNSLRVEDTAVYYCVKDGVHWGQGTLVTVSSTRIQNPDPAVYQLRDSKSSDKSVCLFTDFDSQTNVSQSKDSDVYITDKCVLDMRSMDFKSNSAVAWSNKSDFACANAFNNSIIPEDTFFPSPESSCDVKLVEKSFETDTNLNFQNLSVIGFRILLLKVAGFNLLMTLRLWSSRAKRSGSGVKQTLNFDLLKLAGDVESNPGPSRGHMTEYKPTVRLATRDDVPRAVRTLAAAFADYPATRHTVDPDRHIERVTELQELFLTRVGLDIGKVWVADDGAAVAVWTTPESVEAGAVFAEIGPRMAELSGSRLAAQQQMEGLLAPHRPKEPAWFLATVGVSPDHQGKGLGSAVVLPGVEAAERAGVPAFLETSAPRNLPFYERLGFTVTADVEVPEGPRTWCMTRKPGA

SEQ ID NO: 22838 - protein, 550 aa, Artificial Sequence; identical to SEQ ID NO: 17634
  Synthetic Polypeptide

SEQ ID NO: 22839 - protein, 587 aa, Artificial Sequence
  Synthetic Polypeptide
MALPVTALLLPLALLLHAARPQLQLQESGPGLVKPSETLSLTCTVSGDSISSGDYYWGWIRQPPGKGLEWIGHIYYSGVTYYNPSLKSRVTISVDTSRNQFSLKLSSVTAADTAVYYCTREDSSNWRSRGQGTLVTVSSLESGGGGSFEQLQLQESGPGLVKPSETLSLTCTVSGGSISSGDYYWGWIRQPPGKGLEWIGHIYYSGATYYNPSLKSRVTISVDTSRNQFSLKLSSVTAADTAVYYCTRDDSSNWRSRGQGTLVTVSSTREQKLISEEDGSGIQNPDPAVYQLRDSKSSDKSVCLFTDFDSQTNVSQSKDSDVYITDKCVLDMRSMDFKSNSAVAWSNKSDFACANAFNNSIIPEDTFFPSSDVPCDVKLVEKSFETDTNLNFQNLSVIGFRILLLKVAGFNLLMTLRLWSSRAKRSGSGVKQTLNFDLLKLAGDVESNPGPSRGRMAKPLSQEESTLIERATATINSIPISEDYSVASAALSSDGRIFTGVNVYHFTGGPCAELVVLGTAAAAAAGNLTCIVAIGNENRGILSPCGRCRQVLLDLHPGIKAIVKDSDGQPTAVGIRELLPSGYVWEG

SEQ ID NO: 22840 - protein, 679 aa, Artificial Sequence; identical to SEQ ID NO: 17508
  Synthetic Polypeptide

SEQ ID NO: 22841 - protein, 766 aa, Artificial Sequence
  Synthetic Polypeptide
MALPVTALLLPLALLLHAARPQLQLQESGPGLVKPSETLSLTCTVSGDSISSGDYYWGWIRQPPGKGLEWIGHIYYSGVTYYNPSLKSRVTISVDTSRNQFSLKLSSVTAADTAVYYCTREDSSNWRSRGQGTLVTVSSLEDKTHTCPPCPAIPEDTFFPSPESSCDVKLVEKSFETDTNLNFQNLSVIGFRILLLKVAGFNLLMTLRLWSSRAKRSGSGVKQTLNFDLLKLAGDVESNPGPTSMDWIWRILFLVGAATGAHSFEVQLVESGGGVVQPGRSLRLSCAASGFSFSGYGMHWVRQAPGKGLEWVAYISYDGSNKYYADSVKGRFTISRDNSKNTLYLQMNSLRAEDTAVYYCAKDPAWGLRLGESSSYDFDIWGQGTMVTVSSTRIQNPDPAVYQLRDSKSSDKSVCLFTDFDSQTNVSQSKDSDVYITDKCVLDMRSMDFKSNSAVAWSNKSDFACANAFNNSIIPEDTFFPSPESSCDVKLVEKSFETDTNLNFQNLSVIGFRILLLKVAGFNLLMTLRLWSSRAKRSGSGVKQTLNFDLLKLAGDVESNPGPSRGHMTEYKPTVRLATRDDVPRAVRTLAAAFADYPATRHTVDPDRHIERVTELQELFLTRVGLDIGKVWVADDGAAVAVWTTPESVEAGAVFAEIGPRMAELSGSRLAAQQQMEGLLAPHRPKEPAWFLATVGVSPDHQGKGLGSAVVLPGVEAAERAGVPAFLETSAPRNLPFYERLGFTVTADVEVPEGPRTWCMTRKPGA

SEQ ID NO: 22842 - protein, 745 aa, Artificial Sequence
  Synthetic Polypeptide
MALPVTALLLPLALLLHAARPQLQLQESGPGLVKPSETLSLTCTVSGDSISSGDYYWGWIRQPPGKGLEWIGHIYYSGVTYYNPSLKSRVTISVDTSRNQFSLKLSSVTAADTAVYYCTREDSSNWRSRGQGTLVTVSSLEGSADCGFTSESYQQGVLSATILYEILLGKATLYAVLVSALVLMAMVKRKDSRGRAKRSGSGATNFSLLKQAGDVEENPGPTSMDWIWRILFLVGAATGAHSFEVQLVESGGGVVQPGRSLRLSCAASGFSFSGYGMHWVRQAPGKGLEWVAYISYDGSNKYYADSVKGRFTISRDNSKNTLYLQMNSLRAEDTAVYYCAKDPAWGLRLGESSSYDFDIWGQGTMVTVSSTRIQNPDPAVYQLRDSKSSDKSVCLFTDFDSQTNVSQSKDSDVYITDKCVLDMRSMDFKSNSAVAWSNKSDFACANAFNNSIIPEDTFFPSPESSCDVKLVEKSFETDTNLNFQNLSVIGFRILLLKVAGFNLLMTLRLWSSRAKRSGSGVKQTLNFDLLKLAGDVESNPGPSRGHMTEYKPTVRLATRDDVPRAVRTLAAAFADYPATRHTVDPDRHIERVTELQELFLTRVGLDIGKVWVADDGAAVAVWTTPESVEAGAVFAEIGPRMAELSGSRLAAQQQMEGLLAPHRPKEPAWFLATVGVSPDHQGKGLGSAVVLPGVEAAERAGVPAFLETSAPRNLPFYERLGFTVTADVEVPEGPRTWCMTRKPGA

SEQ ID NO: 22843 - protein, 757 aa, Artificial Sequence
  Synthetic Polypeptide
MALPVTALLLPLALLLHAARPQLQLQESGPGLVKPSETLSLTCTVSGDSISSGDYYWGWIRQPPGKGLEWIGHIYYSGVTYYNPSLKSRVTISVDTSRNQFSLKLSSVTAADTAVYYCTREDSSNWRSRGQGTLVTVSSLEGSIPEDTFFPSPESSCDVKLVEKSFETDTNLNFQNLSVIGFRILLLKVAGFNLLMTLRLWSSRAKRSGSGVKQTLNFDLLKLAGDVESNPGPTSMDWIWRILFLVGAATGAHSFEVQLVESGGGVVQPGRSLRLSCAASGFSFSGYGMHWVRQAPGKGLEWVAYISYDGSNKYYADSVKGRFTISRDNSKNTLYLQMNSLRAEDTAVYYCAKDPAWGLRLGESSSYDFDIWGQGTMVTVSSTRIQNPDPAVYQLRDSKSSDKSVCLFTDFDSQTNVSQSKDSDVYITDKCVLDMRSMDFKSNSAVAWSNKSDFACANAFNNSIIPEDTFFPSPESSCDVKLVEKSFETDTNLNFQNLSVIGFRILLLKVAGFNLLMTLRLWSSRAKRSGSGVKQTLNFDLLKLAGDVESNPGPSRGHMTEYKPTVRLATRDDVPRAVRTLAAAFADYPATRHTVDPDRHIERVTELQELFLTRVGLDIGKVWVADDGAAVAVWTTPESVEAGAVFAEIGPRMAELSGSRLAAQQQMEGLLAPHRPKEPAWFLATVGVSPDHQGKGLGSAVVLPGVEAAERAGVPAFLETSAPRNLPFYERLGFTVTADVEVPEGPRTWCMTRKPGA

SEQ ID NO: 22844 - protein, 770 aa, Artificial Sequence
  Synthetic Polypeptide
MALPVTALLLPLALLLHAARPQLQLQESGPGLVKPSETLSLTCTVSGDSISSGDYYWGWIRQPPGKGLEWIGHIYYSGVTYYNPSLKSRVTISVDTSRNQFSLKLSSVTAADTAVYYCTREDSSNWRSRGQGTLVTVSSLEDKTHTCPPCPAPIKTDVITMDPKDNCSKDANDTLLLQLTNTSAYYMYLLLLLKSVVYFAIITCCLLRRTAFCCNGEKSRAKRSGSGATNFSLLKQAGDVEENPGPTSMDWIWRILFLVGAATGAHSFEVQLVESGGGVVQPGRSLRLSCAASGFSFSGYGMHWVRQAPGKGLEWVAYISYDGSNKYYADSVKGRFTISRDNSKNTLYLQMNSLRAEDTAVYYCAKDPAWGLRLGESSSYDFDIWGQGTMVTVSSTRIQNPDPAVYQLRDSKSSDKSVCLFTDFDSQTNVSQSKDSDVYITDKCVLDMRSMDFKSNSAVAWSNKSDFACANAFNNSIIPEDTFFPSPESSCDVKLVEKSFETDTNLNFQNLSVIGFRILLLKVAGFNLLMTLRLWSSRAKRSGSGVKQTLNFDLLKLAGDVESNPGPSRGHMTEYKPTVRLATRDDVPRAVRTLAAAFADYPATRHTVDPDRHIERVTELQELFLTRVGLDIGKVWVADDGAAVAVWTTPESVEAGAVFAEIGPRMAELSGSRLAAQQQMEGLLAPHRPKEPAWFLATVGVSPDHQGKGLGSAVVLPGVEAAERAGVPAFLETSAPRNLPFYERLGFTVTADVEVPEGPRTWCMTRKPGA

SEQ ID NO: 22845 - protein, 753 aa, Artificial Sequence
  Synthetic Polypeptide
MALPVTALLLPLALLLHAARPQLQLQESGPGLVKPSETLSLTCTVSGDSISSGDYYWGWIRQPPGKGLEWIGHIYYSGVTYYNPSLKSRVTISVDTSRNQFSLKLSSVTAADTAVYYCTREDSSNWRSRGQGTLVTVSSLEGSMDPKDNCSKDANDTLLLQLTNTSAYYMYLLLLLKSVVYFAIITCCLLRRTAFCCNGEKSRAKRSGSGATNFSLLKQAGDVEENPGPTSMDWIWRILFLVGAATGAHSFEVQLVESGGGVVQPGRSLRLSCAASGFSFSGYGMHWVRQAPGKGLEWVAYISYDGSNKYYADSVKGRFTISRDNSKNTLYLQMNSLRAEDTAVYYCAKDPAWGLRLGESSSYDFDIWGQGTMVTVSSTRIQNPDPAVYQLRDSKSSDKSVCLFTDFDSQTNVSQSKDSDVYITDKCVLDMRSMDFKSNSAVAWSNKSDFACANAFNNSIIPEDTFFPSPESSCDVKLVEKSFETDTNLNFQNLSVIGFRILLLKVAGFNLLMTLRLWSSRAKRSGSGVKQTLNFDLLKLAGDVESNPGPSRGHMTEYKPTVRLATRDDVPRAVRTLAAAFADYPATRHTVDPDRHIERVTELQELFLTRVGLDIGKVWVADDGAAVAVWTTPESVEAGAVFAEIGPRMAELSGSRLAAQQQMEGLLAPHRPKEPAWFLATVGVSPDHQGKGLGSAVVLPGVEAAERAGVPAFLETSAPRNLPFYERLGFTVTADVEVPEGPRTWCMTRKPGA

SEQ ID NO: 22846 - protein, 761 aa, Artificial Sequence
  Synthetic Polypeptide
MALPVTALLLPLALLLHAARPQLQLQESGPGLVKPSETLSLTCTVSGDSISSGDYYWGWIRQPPGKGLEWIGHIYYSGVTYYNPSLKSRVTISVDTSRNQFSLKLSSVTAADTAVYYCTREDSSNWRSRGQGTLVTVSSLEGSPIKTDVITMDPKDNCSKDANDTLLLQLTNTSAYYMYLLLLLKSVVYFAIITCCLLRRTAFCCNGEKSRAKRSGSGATNFSLLKQAGDVEENPGPTSMDWIWRILFLVGAATGAHSFEVQLVESGGGVVQPGRSLRLSCAASGFSFSGYGMHWVRQAPGKGLEWVAYISYDGSNKYYADSVKGRFTISRDNSKNTLYLQMNSLRAEDTAVYYCAKDPAWGLRLGESSSYDFDIWGQGTMVTVSSTRIQNPDPAVYQLRDSKSSDKSVCLFTDFDSQTNVSQSKDSDVYITDKCVLDMRSMDFKSNSAVAWSNKSDFACANAFNNSIIPEDTFFPSPESSCDVKLVEKSFETDTNLNFQNLSVIGFRILLLKVAGFNLLMTLRLWSSRAKRSGSGVKQTLNFDLLKLAGDVESNPGPSRGHMTEYKPTVRLATRDDVPRAVRTLAAAFADYPATRHTVDPDRHIERVTELQELFLTRVGLDIGKVWVADDGAAVAVWTTPESVEAGAVFAEIGPRMAELSGSRLAAQQQMEGLLAPHRPKEPAWFLATVGVSPDHQGKGLGSAVVLPGVEAAERAGVPAFLETSAPRNLPFYERLGFTVTADVEVPEGPRTWCMTRKPGA

SEQ ID NO: 22847 - protein, 765 aa, Artificial Sequence
  Synthetic Polypeptide
MALPVTALLLPLALLLHAARPQLQLQESGPGLVKPSETLSLTCTVSGDSISSGDYYWGWIRQPPGKGLEWIGHIYYSGVTYYNPSLKSRVTISVDTSRNQFSLKLSSVTAADTAVYYCTREDSSNWRSRGQGTLVTVSSLEGSEVKTDSTDHVKPKETENTKQPSKSCHKPKAIVHTEKVNMMSLTVLGLRMLFAKTVAVNFLLTAKLFFLRAKRSGSGVKQTLNFDLLKLAGDVESNPGPTSMDWIWRILFLVGAATGAHSFEVQLVESGGGVVQPGRSLRLSCAASGFSFSGYGMHWVRQAPGKGLEWVAYISYDGSNKYYADSVKGRFTISRDNSKNTLYLQMNSLRAEDTAVYYCAKDPAWGLRLGESSSYDFDIWGQGTMVTVSSTRIQNPDPAVYQLRDSKSSDKSVCLFTDFDSQTNVSQSKDSDVYITDKCVLDMRSMDFKSNSAVAWSNKSDFACANAFNNSIIPEDTFFPSPESSCDVKLVEKSFETDTNLNFQNLSVIGFRILLLKVAGFNLLMTLRLWSSRAKRSGSGVKQTLNFDLLKLAGDVESNPGPSRGHMTEYKPTVRLATRDDVPRAVRTLAAAFADYPATRHTVDPDRHIERVTELQELFLTRVGLDIGKVWVADDGAAVAVWTTPESVEAGAVFAEIGPRMAELSGSRLAAQQQMEGLLAPHRPKEPAWFLATVGVSPDHQGKGLGSAVVLPGVEAAERAGVPAFLETSAPRNLPFYERLGFTVTADVEVPEGPRTWCMTRKPGA

SEQ ID NO: 22848 - protein, 774 aa, Artificial Sequence
  Synthetic Polypeptide
MALPVTALLLPLALLLHAARPQLQLQESGPGLVKPSETLSLTCTVSGDSISSGDYYWGWIRQPPGKGLEWIGHIYYSGVTYYNPSLKSRVTISVDTSRNQFSLKLSSVTAADTAVYYCTREDSSNWRSRGQGTLVTVSSLEDKTHTCPPCPAEVKTDSTDHVKPKETENTKQPSKSCHKPKAIVHTEKVNMMSLTVLGLRMLFAKTVAVNFLLTAKLFFLRAKRSGSGVKQTLNFDLLKLAGDVESNPGPTSMDWIWRILFLVGAATGAHSFEVQLVESGGGVVQPGRSLRLSCAASGFSFSGYGMHWVRQAPGKGLEWVAYISYDGSNKYYADSVKGRFTISRDNSKNTLYLQMNSLRAEDTAVYYCAKDPAWGLRLGESSSYDFDIWGQGTMVTVSSTRIQNPDPAVYQLRDSKSSDKSVCLFTDFDSQTNVSQSKDSDVYITDKCVLDMRSMDFKSNSAVAWSNKSDFACANAFNNSIIPEDTFFPSPESSCDVKLVEKSFETDTNLNFQNLSVIGFRILLLKVAGFNLLMTLRLWSSRAKRSGSGVKQTLNFDLLKLAGDVESNPGPSRGHMTEYKPTVRLATRDDVPRAVRTLAAAFADYPATRHTVDPDRHIERVTELQELFLTRVGLDIGKVWVADDGAAVAVWTTPESVEAGAVFAEIGPRMAELSGSRLAAQQQMEGLLAPHRPKEPAWFLATVGVSPDHQGKGLGSAVVLPGVEAAERAGVPAFLETSAPRNLPFYERLGFTVTADVEVPEGPRTWCMTRKPGA

SEQ ID NO: 22849 - protein, 590 aa, Artificial Sequence
  Synthetic Polypeptide
MALPVTALLLPLALLLHAARPQLQLQESGPGLVKPSETLSLTCTVSGDSISSGDYYWGWIRQPPGKGLEWIGHIYYSGVTYYNPSLKSRVTISVDTSRNQFSLKLSSVTAADTAVYYCTREDSSNWRSRGQGTLVTVSSLESGGGGSFEEVQLLESGGGLVQPGGSLRLSCAASGFTFSSYAMSWVRQAPGKGLEWVSSISGSGDYIYYADSVKGRFTISRDISKNTLYLQMNSLRAEDTAVYYCAKEGTGANSSLADYRGQGTLVTVSSTREQKLISEEDGSGIQNPDPAVYQLRDSKSSDKSVCLFTDFDSQTNVSQSKDSDVYITDKCVLDMRSMDFKSNSAVAWSNKSDFACANAFNNSIIPEDTFFPSSDVPCDVKLVEKSFETDTNLNFQNLSVIGFRILLLKVAGFNLLMTLRLWSSRAKRSGSGVKQTLNFDLLKLAGDVESNPGPSRGRMAKPLSQEESTLIERATATINSIPISEDYSVASAALSSDGRIFTGVNVYHFTGGPCAELVVLGTAAAAAAGNLTCIVAIGNENRGILSPCGRCRQVLLDLHPGIKAIVKDSDGQPTAVGIRELLPSGYVWEG

SEQ ID NO: 22850 - protein, 642 aa, Artificial Sequence
  Synthetic Polypeptide
MALPVTALLLPLALLLHAARPQLQLQESGPGLVKPSETLSLTCTVSGDSISSGDYYWGWIRQPPGKGLEWIGHIYYSGVTYYNPSLKSRVTISVDTSRNQFSLKLSSVTAADTAVYYCTREDSSNWRSRGQGTLVTVSSLDSGGGGSFEQLQLQESGPGLVKPSETLSLTCTVSGGSISSGDYYWGWIRQPPGKGLEWIGHIYYSGATYYNPSLKSRVTISVDTSRNQFSLKLSSVTAADTAVYYCTRDDSSNWRSRGQGTLVTVSSTRIQNPDPAVYQLRDSKSSDKSVCLFTDFDSQTNVSQSKDSDVYITDKTVLDMRSMDFKSNSAVAWSNKSDFACANAFNNSIIPEDTFFPSPESSCDVKLVEKSFETDTNLNFQNLSVIGFRILLLKVAGFNLLMTLRLWSSRAKRSGSGVKQTLNFDLLKLAGDVESNPGPSRGHMTEYKPTVRLATRDDVPRAVRTLAAAFADYPATRHTVDPDRHIERVTELQELFLTRVGLDIGKVWVADDGAAVAVWTTPESVEAGAVFAEIGPRMAELSGSRLAAQQQMEGLLAPHRPKEPAWFLATVGVSPDHQGKGLGSAVVLPGVEAAERAGVPAFLETSAPRNLPFYERLGFTVTADVEVPEGPRTWCMTRKPGA

SEQ ID NO: 22851 - protein, 549 aa, Artificial Sequence; identical to SEQ ID NO: 17196
  Synthetic Polypeptide

SEQ ID NO: 22852 - protein, 445 aa, Artificial Sequence
  Synthetic Polypeptide
MALPVTALLLPLALLLHAARPQLQLQESGPGLVKPSETLSLTCTVSGDSISSGDYYWGWIRQPPGKGLEWIGHIYYSGVTYYNPSLKSRVTISVDTSRNQFSLKLSSVTAADTAVYYCTREDSSNWRSRGQGTLVTVSSLEGSGRADCGFTSESYQQGVLSATILYEILLGKATLYAVLVSALVLMAMVKRKDSRGRAKRSGSGATNFSLLKQAGDVEENPGPTSMDWIWRILFLVGAATGAHSFEVQLLESGGGLIQPGGSLRLSCAASGFTFSSHAMTWVRQAPGKGLEWVSAISGSGDYTHYADSVKGRFTISRDNSKNTVYLQMNSLRAEDSAVYYCAKDEDGGSLLGHRGQGTLVTVSSTRDKTHTCPPCPAEVKTDSTDHVKPKETENTKQPSKSCHKPKAIVHTEKVNMMSLTVLGLRMLFAKTVAVNFLLTAKLFFL

SEQ ID NO: 22853 - protein, 429 aa, Artificial Sequence
  Synthetic Polypeptide
MALPVTALLLPLALLLHAARPQLQLQESGPGLVKPSETLSLTCTVSGDSISSGDYYWGWIRQPPGKGLEWIGHIYYSGVTYYNPSLKSRVTISVDTSRNQFSLKLSSVTAADTAVYYCTREDSSNWRSRGQGTLVTVSSLEGSGRADCGFTSESYQQGVLSATILYEILLGKATLYAVLVSALVLMAMVKRKDSRGRAKRSGSGATNFSLLKQAGDVEENPGPTSMDWIWRILFLVGAATGAHSFEVQLLESGGGLIQPGGSLRLSCAASGFTFSSHAMTWVRQAPGKGLEWVSAISGSGDYTHYADSVKGRFTISRDNSKNTVYLQMNSLRAEDSAVYYCAKDEDGGSLLGHRGQGTLVTVSSTRGSDHVKPKETENTKQPSKSCHKPKAIVHTEKVNMMSLTVLGLRMLFAKTVAVNFLLTAKLFFL

SEQ ID NO: 22854 - protein, 454 aa, Artificial Sequence
  Synthetic Polypeptide
MALPVTALLLPLALLLHAARPQLQLQESGPGLVKPSETLSLTCTVSGDSISSGDYYWGWIRQPPGKGLEWIGHIYYSGVTYYNPSLKSRVTISVDTSRNQFSLKLSSVTAADTAVYYCTREDSSNWRSRGQGTLVTVSSLEDKTHTCPPCPAGRADCGFTSESYQQGVLSATILYEILLGKATLYAVLVSALVLMAMVKRKDSRGRAKRSGSGATNFSLLKQAGDVEENPGPTSMDWIWRILFLVGAATGAHSFEVQLLESGGGLIQPGGSLRLSCAASGFTFSSHAMTWVRQAPGKGLEWVSAISGSGDYTHYADSVKGRFTISRDNSKNTVYLQMNSLRAEDSAVYYCAKDEDGGSLLGHRGQGTLVTVSSTRDKTHTCPPCPAEVKTDSTDHVKPKETENTKQPSKSCHKPKAIVHTEKVNMMSLTVLGLRMLFAKTVAVNFLLTAKLFFL

SEQ ID NO: 22855 - protein, 438 aa, Artificial Sequence
  Synthetic Polypeptide
MALPVTALLLPLALLLHAARPQLQLQESGPGLVKPSETLSLTCTVSGDSISSGDYYWGWIRQPPGKGLEWIGHIYYSGVTYYNPSLKSRVTISVDTSRNQFSLKLSSVTAADTAVYYCTREDSSNWRSRGQGTLVTVSSLEDKTHTCPPCPAGRADCGFTSESYQQGVLSATILYEILLGKATLYAVLVSALVLMAMVKRKDSRGRAKRSGSGATNFSLLKQAGDVEENPGPTSMDWIWRILFLVGAATGAHSFEVQLLESGGGLIQPGGSLRLSCAASGFTFSSHAMTWVRQAPGKGLEWVSAISGSGDYTHYADSVKGRFTISRDNSKNTVYLQMNSLRAEDSAVYYCAKDEDGGSLLGHRGQGTLVTVSSTRGSDHVKPKETENTKQPSKSCHKPKAIVHTEKVNMMSLTVLGLRMLFAKTVAVNFLLTAKLFFL

SEQ ID NO: 22856 - protein, 670 aa, Artificial Sequence; identical to SEQ ID NO: 17507
  Synthetic Polypeptide

SEQ ID NO: 22857 - protein, 676 aa, Artificial Sequence
  Synthetic Polypeptide
MALPVTALLLPLALLLHAARPQLQLQESGPGLVKPSETLSLTCTVSGDSISSGDYYWGWIRQPPGKGLEWIGHIYYSGVTYYNPSLKSRVTISVDTSRNQFSLKLSSVTAADTAVYYCTREDSSNWRSRGQGTLVTVSSLEGSADCGFTSESYQQGVLSATILYEILLGKATLYAVLVSALVLMAMVKRKDSRGRAKRSGSGATNFSLLKQAGDVEENPGPTSMDWIWRILFLVGAATGAHSFEVQLVESGGGVVQPGRSLRLSCAASGFSFSGYGMHWVRQAPGKGLEWVAYISYDGSNKYYADSVKGRFTISRDNSKNTLYLQMNSLRAEDTAVYYCAKDPAWGLRLGESSSYDFDIWGQGTMVTVSSTRDKTHTCPPCPAIPEDTFFPSPESSCDVKLVEKSFETDTNLNFQNLSVIGFRILLLKVAGFNLLMTLRLWSSRAKRSGSGVKQTLNFDLLKLAGDVESNPGPSRGHMTEYKPTVRLATRDDVPRAVRTLAAAFADYPATRHTVDPDRHIERVTELQELFLTRVGLDIGKVWVADDGAAVAVWTTPESVEAGAVFAEIGPRMAELSGSRLAAQQQMEGLLAPHRPKEPAWFLATVGVSPDHQGKGLGSAVVLPGVEAAERAGVPAFLETSAPRNLPFYERLGFTVTADVEVPEGPRTWCMTRKPGA

SEQ ID NO: 22858 - protein, 701 aa, Artificial Sequence
  Synthetic Polypeptide
MALPVTALLLPLALLLHAARPQLQLQESGPGLVKPSETLSLTCTVSGDSISSGDYYWGWIRQPPGKGLEWIGHIYYSGVTYYNPSLKSRVTISVDTSRNQFSLKLSSVTAADTAVYYCTREDSSNWRSRGQGTLVTVSSLEDKTHTCPPCPAPIKTDVITMDPKDNCSKDANDTLLLQLTNTSAYYMYLLLLLKSVVYFAIITCCLLRRTAFCCNGEKSRAKRSGSGATNFSLLKQAGDVEENPGPTSMDWIWRILFLVGAATGAHSFEVQLVESGGGVVQPGRSLRLSCAASGFSFSGYGMHWVRQAPGKGLEWVAYISYDGSNKYYADSVKGRFTISRDNSKNTLYLQMNSLRAEDTAVYYCAKDPAWGLRLGESSSYDFDIWGQGTMVTVSSTRDKTHTCPPCPAIPEDTFFPSPESSCDVKLVEKSFETDTNLNFQNLSVIGFRILLLKVAGFNLLMTLRLWSSRAKRSGSGVKQTLNFDLLKLAGDVESNPGPSRGHMTEYKPTVRLATRDDVPRAVRTLAAAFADYPATRHTVDPDRHIERVTELQELFLTRVGLDIGKVWVADDGAAVAVWTTPESVEAGAVFAEIGPRMAELSGSRLAAQQQMEGLLAPHRPKEPAWFLATVGVSPDHQGKGLGSAVVLPGVEAAERAGVPAFLETSAPRNLPFYERLGFTVTADVEVPEGPRTWCMTRKPGA

SEQ ID NO: 22859 - protein, 684 aa, Artificial Sequence
  Synthetic Polypeptide
MALPVTALLLPLALLLHAARPQLQLQESGPGLVKPSETLSLTCTVSGDSISSGDYYWGWIRQPPGKGLEWIGHIYYSGVTYYNPSLKSRVTISVDTSRNQFSLKLSSVTAADTAVYYCTREDSSNWRSRGQGTLVTVSSLEGSMDPKDNCSKDANDTLLLQLTNTSAYYMYLLLLLKSVVYFAIITCCLLRRTAFCCNGEKSRAKRSGSGATNFSLLKQAGDVEENPGPTSMDWIWRILFLVGAATGAHSFEVQLVESGGGVVQPGRSLRLSCAASGFSFSGYGMHWVRQAPGKGLEWVAYISYDGSNKYYADSVKGRFTISRDNSKNTLYLQMNSLRAEDTAVYYCAKDPAWGLRLGESSSYDFDIWGQGTMVTVSSTRDKTHTCPPCPAIPEDTFFPSPESSCDVKLVEKSFETDTNLNFQNLSVIGFRILLLKVAGFNLLMTLRLWSSRAKRSGSGVKQTLNFDLLKLAGDVESNPGPSRGHMTEYKPTVRLATRDDVPRAVRTLAAAFADYPATRHTVDPDRHIERVTELQELFLTRVGLDIGKVWVADDGAAVAVWTTPESVEAGAVFAEIGPRMAELSGSRLAAQQQMEGLLAPHRPKEPAWFLATVGVSPDHQGKGLGSAVVLPGVEAAERAGVPAFLETSAPRNLPFYERLGFTVTADVEVPEGPRTWCMTRKPGA

SEQ ID NO: 22860 - protein, 692 aa, Artificial Sequence
  Synthetic Polypeptide
MALPVTALLLPLALLLHAARPQLQLQESGPGLVKPSETLSLTCTVSGDSISSGDYYWGWIRQPPGKGLEWIGHIYYSGVTYYNPSLKSRVTISVDTSRNQFSLKLSSVTAADTAVYYCTREDSSNWRSRGQGTLVTVSSLEGSPIKTDVITMDPKDNCSKDANDTLLLQLTNTSAYYMYLLLLLKSVVYFAIITCCLLRRTAFCCNGEKSRAKRSGSGATNFSLLKQAGDVEENPGPTSMDWIWRILFLVGAATGAHSFEVQLVESGGGVVQPGRSLRLSCAASGFSFSGYGMHWVRQAPGKGLEWVAYISYDGSNKYYADSVKGRFTISRDNSKNTLYLQMNSLRAEDTAVYYCAKDPAWGLRLGESSSYDFDIWGQGTMVTVSSTRDKTHTCPPCPAIPEDTFFPSPESSCDVKLVEKSFETDTNLNFQNLSVIGFRILLLKVAGFNLLMTLRLWSSRAKRSGSGVKQTLNFDLLKLAGDVESNPGPSRGHMTEYKPTVRLATRDDVPRAVRTLAAAFADYPATRHTVDPDRHIERVTELQELFLTRVGLDIGKVWVADDGAAVAVWTTPESVEAGAVFAEIGPRMAELSGSRLAAQQQMEGLLAPHRPKEPAWFLATVGVSPDHQGKGLGSAVVLPGVEAAERAGVPAFLETSAPRNLPFYERLGFTVTADVEVPEGPRTWCMTRKPGA

SEQ ID NO: 22861 - protein, 576 aa, Artificial Sequence
  Synthetic Polypeptide
MALPVTALLLPLALLLHAARPQLQLQESGPGLVKPSETLSLTCTVSGDSISSGDYYWGWIRQPPGKGLEWIGHIYYSGVTYYNPSLKSRVTISVDTSRNQFSLKLSSVTAADTAVYYCTREDSSNWRSRGQGTLVTVSSLESGGGGSFEEVQLLESGGGLVQPGGSLRLSCAASGFTFSSYAMSWVRQAPGKGLEWVSSISGSGDYIYYADSVKGRFTISRDISKNTLYLQMNSLRAEDTAVYYCAKEGTGANSSLADYRGQGTLVTVSSTRDKTHTCPPCPAIPEDTFFPSPESSCDVKLVEKSFETDTNLNFQNLSVIGFRILLLKVAGFNLLMTLRLWSSRAKRSGSGVKQTLNFDLLKLAGDVESNPGPSRGHMTEYKPTVRLATRDDVPRAVRTLAAAFADYPATRHTVDPDRHIERVTELQELFLTRVGLDIGKVWVADDGAAVAVWTTPESVEAGAVFAEIGPRMAELSGSRLAAQQQMEGLLAPHRPKEPAWFLATVGVSPDHQGKGLGSAVVLPGVEAAERAGVPAFLETSAPRNLPFYERLGFTVTADVEVPEGPRTWCMTRKPGA

SEQ ID NO: 22862 - protein, 762 aa, Artificial Sequence
  Synthetic Polypeptide
MALPVTALLLPLALLLHAARPQLQLQESGPGLVKPSETLSLTCTVSGDSISSGDYYWGWIRQPPGKGLEWIGHIYYSGVTYYNPSLKSRVTISVDTSRNQFSLKLSSVTAADTAVYYCTREDSSNWRSRGQGTLVTVSSLEDKTHTCPPCPAPIKTDVITMDPKDNCSKDANDTLLLQLTNTSAYYMYLLLLLKSVVYFAIITCCLLRRTAFCCNGEKSRAKRSGSGATNFSLLKQAGDVEENPGPTSMDWIWRILFLVGAATGAHSFEVQLLESGGGLIQPGGSLRLSCAASGFTFSSHAMTWVRQAPGKGLEWVSAISGSGDYTHYADSVKGRFTISRDNSKNTVYLQMNSLRAEDSAVYYCAKDEDGGSLLGHRGQGTLVTVSSTRIQNPDPAVYQLRDSKSSDKSVCLFTDFDSQTNVSQSKDSDVYITDKCVLDMRSMDFKSNSAVAWSNKSDFACANAFNNSIIPEDTFFPSPESSCDVKLVEKSFETDTNLNFQNLSVIGFRILLLKVAGFNLLMTLRLWSSRAKRSGSGVKQTLNFDLLKLAGDVESNPGPSRGHMTEYKPTVRLATRDDVPRAVRTLAAAFADYPATRHTVDPDRHIERVTELQELFLTRVGLDIGKVWVADDGAAVAVWTTPESVEAGAVFAEIGPRMAELSGSRLAAQQQMEGLLAPHRPKEPAWFLATVGVSPDHQGKGLGSAVVLPGVEAAERAGVPAFLETSAPRNLPFYERLGFTVTADVEVPEGPRTWCMTRKPGA

SEQ ID NO: 22863 - protein, 891 aa, Artificial Sequence
  Synthetic Polypeptide
MALPVTALLLPLALLLHAARPQVQLVESGGGLVQPGGSLRLSCAASGFTFTNHAMSWVRQAPGKGLELVSSISGNGRTTYYADSVKGRFTISRDISKNTLDLQMNSLRAEDTAVYYCAKDGGETLVDSRGQGTLVTVSSLEGQPKANPTVTLFPPSSEELQANKATLVCLISDFYPGAVTVAWKADGSPVKAGVETTKPSKQSNNKYAASSYLSLTPEQWKSHRSYSCQVTHEGSTVEKTVAPTECSPIKTDVITMDPKDNCSKDANDTLLLQLTNTSAYYMYLLLLLKSVVYFAIITCCLLRRTAFCCNGEKSRAKRSGSGATNFSLLKQAGDVEENPGPTSMDWIWRILFLVGAATGAHSFEEVQLLESGGGLVQPGGSLRLSCAASGFTFSSYAMSWVRQAPGKGLEWVSSISGSGDYIYYADSVKGRFTISRDISKNTLYLQMNSLRAEDTAVYYCAKEGTGANSSLADYRGQGTLVTVSSTRASTKGPSVFPLAPSSKSTSGGTAALGCLVKDYFPEPVTVSWNSGALTSGVHTFPAVLQSSGLYSLSSVVTVPSSSLGTQTYICNVNHKPSNTKVDKRVEPKSCEVKTDSTDHVKPKETENTKQPSKSCHKPKAIVHTEKVNMMSLTVLGLRMLFAKTVAVNFLLTAKLFFLRAKRSGSGVKQTLNFDLLKLAGDVESNPGPSRGHMTEYKPTVRLATRDDVPRAVRTLAAAFADYPATRHTVDPDRHIERVTELQELFLTRVGLDIGKVWVADDGAAVAVWTTPESVEAGAVFAEIGPRMAELSGSRLAAQQQMEGLLAPHRPKEPAWFLATVGVSPDHQGKGLGSAVVLPGVEAAERAGVPAFLETSAPRNLPFYERLGFTVTADVEVPEGPRTWCMTRKPGA

SEQ ID NO: 22864 - protein, 888 aa, Artificial Sequence; identical to SEQ ID NO: 17511
  Synthetic Polypeptide

SEQ ID NO: 22865 - protein, 891 aa, Artificial Sequence; identical to SEQ ID NO: 22863
  Synthetic Polypeptide

SEQ ID NO: 22866 - protein, 454 aa, Artificial Sequence; identical to SEQ ID NO: 22854
  Synthetic Polypeptide

SEQ ID NO: 22867 - protein, 697 aa, Artificial Sequence
  Synthetic Polypeptide
MALPVTALLLPLALLLHAARPQLQLQESGPGLVKPSETLSLTCTVSGDSISSGDYYWGWIRQPPGKGLEWIGHIYYSGVTYYNPSLKSRVTISVDTSRNQFSLKLSSVTAADTAVYYCTREDSSNWRSRGQGTLVTVSSLEDKTHTCPPCPAEVKTDSTDHVKPKETENTKQPSKSCHKPKAIVHTEKVNMMSLTVLGLRMLFAKTVAVNFLLTAKLFFLRAKRSGSGVKQTLNFDLLKLAGDVESNPGPTSMDWIWRILFLVGAATGAHSFEVQLLESGGGLIQPGGSLRLSCAASGFTFSSHAMTWVRQAPGKGLEWVSAISGSGDYTHYADSVKGRFTISRDNSKNTVYLQMNSLRAEDSAVYYCAKDEDGGSLLGHRGQGTLVTVSSTRDKTHTCPPCPAIPEDTFFPSPESSCDVKLVEKSFETDTNLNFQNLSVIGFRILLLKVAGFNLLMTLRLWSSRAKRSGSGVKQTLNFDLLKLAGDVESNPGPSRGHMTEYKPTVRLATRDDVPRAVRTLAAAFADYPATRHTVDPDRHIERVTELQELFLTRVGLDIGKVWVADDGAAVAVWTTPESVEAGAVFAEIGPRMAELSGSRLAAQQQMEGLLAPHRPKEPAWFLATVGVSPDHQGKGLGSAVVLPGVEAAERAGVPAFLETSAPRNLPFYERLGFTVTADVEVPEGPRTWCMTRKPGA

SEQ ID NO: 22868 - protein, 701 aa, Artificial Sequence; identical to SEQ ID NO: 22858
  Synthetic Polypeptide

SEQ ID NO: 22869 - protein, 673 aa, Artificial Sequence
  Synthetic Polypeptide
MALPVTALLLPLALLLHAARPQLQLQESGPGLVKPSETLSLTCTVSGDSISSGDYYWGWIRQPPGKGLEWIGHIYYSGVTYYNPSLKSRVTISVDTSRNQFSLKLSSVTAADTAVYYCTREDSSNWRSRGQGTLVTVSSLEGSPIKTDVITMDPKDNCSKDANDTLLLQLTNTSAYYMYLLLLLKSVVYFAIITCCLLRRTAFCCNGEKSRAKRSGSGATNFSLLKQAGDVEENPGPTSMDWIWRILFLVGAATGAHSFEVQLVESGGGVVQPGRSLRLSCAASGFSFSGYGMHWVRQAPGKGLEWVAYISYDGSNKYYADSVKGRFTISRDNSKNTLYLQMNSLRAEDTAVYYCAKDPAWGLRLGESSSYDFDIWGQGTMVTVSSTRGSGRADCGFTSESYQQGVLSATILYEILLGKATLYAVLVSALVLMAMVKRKDSRGRAKRSGSGATNFSLLKQAGDVEENPGPSRGHMTEYKPTVRLATRDDVPRAVRTLAAAFADYPATRHTVDPDRHIERVTELQELFLTRVGLDIGKVWVADDGAAVAVWTTPESVEAGAVFAEIGPRMAELSGSRLAAQQQMEGLLAPHRPKEPAWFLATVGVSPDHQGKGLGSAVVLPGVEAAERAGVPAFLETSAPRNLPFYERLGFTVTADVEVPEGPRTWCMTRKPGA

SEQ ID NO: 22870 - protein, 677 aa, Artificial Sequence
  Synthetic Polypeptide
MALPVTALLLPLALLLHAARPQLQLQESGPGLVKPSETLSLTCTVSGDSISSGDYYWGWIRQPPGKGLEWIGHIYYSGVTYYNPSLKSRVTISVDTSRNQFSLKLSSVTAADTAVYYCTREDSSNWRSRGQGTLVTVSSLEGSEVKTDSTDHVKPKETENTKQPSKSCHKPKAIVHTEKVNMMSLTVLGLRMLFAKTVAVNFLLTAKLFFLRAKRSGSGVKQTLNFDLLKLAGDVESNPGPTSMDWIWRILFLVGAATGAHSFEVQLVESGGGVVQPGRSLRLSCAASGFSFSGYGMHWVRQAPGKGLEWVAYISYDGSNKYYADSVKGRFTISRDNSKNTLYLQMNSLRAEDTAVYYCAKDPAWGLRLGESSSYDFDIWGQGTMVTVSSTRGSGRADCGFTSESYQQGVLSATILYEILLGKATLYAVLVSALVLMAMVKRKDSRGRAKRSGSGATNFSLLKQAGDVEENPGPSRGHMTEYKPTVRLATRDDVPRAVRTLAAAFADYPATRHTVDPDRHIERVTELQELFLTRVGLDIGKVWVADDGAAVAVWTTPESVEAGAVFAEIGPRMAELSGSRLAAQQQMEGLLAPHRPKEPAWFLATVGVSPDHQGKGLGSAVVLPGVEAAERAGVPAFLETSAPRNLPFYERLGFTVTADVEVPEGPRTWCMTRKPGA

SEQ ID NO: 22871 - protein, 680 aa, Artificial Sequence
  Synthetic Polypeptide
MALPVTALLLPLALLLHAARPQLQLQESGPGLVKPSETLSLTCTVSGDSISSGDYYWGWIRQPPGKGLEWIGHIYYSGVTYYNPSLKSRVTISVDTSRNQFSLKLSSVTAADTAVYYCTREDSSNWRSRGQGTLVTVSSLEGSPIKTDVITMDPKDNCSKDANDTLLLQLTNTSAYYMYLLLLLKSVVYFAIITCCLLRRTAFCCNGEKSRAKRSGSGATNFSLLKQAGDVEENPGPTSMDWIWRILFLVGAATGAHSFEVQLVESGGGVVQPGRSLRLSCAASGFSFSGYGMHWVRQAPGKGLEWVAYISYDGSNKYYADSVKGRFTISRDNSKNTLYLQMNSLRAEDTAVYYCAKDPAWGLRLGESSSYDFDIWGQGTMVTVSSTRDKTHTCPPCPAGRADCGFTSESYQQGVLSATILYEILLGKATLYAVLVSALVLMAMVKRKDFRAKRSGSGATNFSLLKQAGDVEENPGPSRGHMTEYKPTVRLATRDDVPRAVRTLAAAFADYPATRHTVDPDRHIERVTELQELFLTRVGLDIGKVWVADDGAAVAVWTTPESVEAGAVFAEIGPRMAELSGSRLAAQQQMEGLLAPHRPKEPAWFLATVGVSPDHQGKGLGSAVVLPGVEAAERAGVPAFLETSAPRNLPFYERLGFTVTADVEVPEGPRTWCMTRKPGA

SEQ ID NO: 22872 - protein, 684 aa, Artificial Sequence
  Synthetic Polypeptide
MALPVTALLLPLALLLHAARPQLQLQESGPGLVKPSETLSLTCTVSGDSISSGDYYWGWIRQPPGKGLEWIGHIYYSGVTYYNPSLKSRVTISVDTSRNQFSLKLSSVTAADTAVYYCTREDSSNWRSRGQGTLVTVSSLEGSEVKTDSTDHVKPKETENTKQPSKSCHKPKAIVHTEKVNMMSLTVLGLRMLFAKTVAVNFLLTAKLFFLRAKRSGSGVKQTLNFDLLKLAGDVESNPGPTSMDWIWRILFLVGAATGAHSFEVQLVESGGGVVQPGRSLRLSCAASGFSFSGYGMHWVRQAPGKGLEWVAYISYDGSNKYYADSVKGRFTISRDNSKNTLYLQMNSLRAEDTAVYYCAKDPAWGLRLGESSSYDFDIWGQGTMVTVSSTRDKTHTCPPCPAGRADCGFTSESYQQGVLSATILYEILLGKATLYAVLVSALVLMAMVKRKDFRAKRSGSGATNFSLLKQAGDVEENPGPSRGHMTEYKPTVRLATRDDVPRAVRTLAAAFADYPATRHTVDPDRHIERVTELQELFLTRVGLDIGKVWVADDGAAVAVWTTPESVEAGAVFAEIGPRMAELSGSRLAAQQQMEGLLAPHRPKEPAWFLATVGVSPDHQGKGLGSAVVLPGVEAAERAGVPAFLETSAPRNLPFYERLGFTVTADVEVPEGPRTWCMTRKPGA

SEQ ID NO: 22873 - protein, 870 aa, Artificial Sequence
  Synthetic Polypeptide
MALPVTALLLPLALLLHAARPQLQLQESGPGLVKPSETLSLTCTVSGDSISSGDYYWGWIRQPPGKGLEWIGHIYYSGVTYYNPSLKSRVTISVDTSRNQFSLKLSSVTAADTAVYYCTREDSSNWRSRGQGTLVTVSSLEDLKNVFPPEVAVFEPSEAEISHTQKATLVCLATGFYPDHVELSWWVNGKEVHSGVCTDPQPLKEQPALNDSRYCLSSRLRVSATFWQNPRNHFRCQVQFYGLSENDEWTQDRAKPVTQIVSAEAWGRADCGFTSESYQQGVLSATILYEILLGKATLYAVLVSALVLMAMVKRKDSRGRAKRSGSGATNFSLLKQAGDVEENPGPTSMDWIWRILFLVGAATGAHSFEVQLVESGGGVVQPGRSLRLSCAASGFSFSGYGMHWVRQAPGKGLEWVAYISYDGSNKYYADSVKGRFTISRDNSKNTLYLQMNSLRAEDTAVYYCAKDPAWGLRLGESSSYDFDIWGQGTMVTVSSTRIQNPDPAVYQLRDSKSSDKSVCLFTDFDSQTNVSQSKDSDVYITDKCVLDMRSMDFKSNSAVAWSNKSDFACANAFNNSIIPEDTFFPSPESSCDVKLVEKSFETDTNLNFQNLSVIGFRILLLKVAGFNLLMTLRLWSSRAKRSGSGVKQTLNFDLLKLAGDVESNPGPSRGHMTEYKPTVRLATRDDVPRAVRTLAAAFADYPATRHTVDPDRHIERVTELQELFLTRVGLDIGKVWVADDGAAVAVWTTPESVEAGAVFAEIGPRMAELSGSRLAAQQQMEGLLAPHRPKEPAWFLATVGVSPDHQGKGLGSAVVLPGVEAAERAGVPAFLETSAPRNLPFYERLGFTVTADVEVPEGPRTWCMTRKPGA

SEQ ID NO: 22874 - protein, 857 aa, Artificial Sequence
  Synthetic Polypeptide
MALPVTALLLPLALLLHAARPQLQLQESGPGLVKPSETLSLTCTVSGDSISSGDYYWGWIRQPPGKGLEWIGHIYYSGVTYYNPSLKSRVTISVDTSRNQFSLKLSSVTAADTAVYYCTREDSSNWRSRGQGTLVTVSSLEDLKNVFPPEVAVFEPSEAEISHTQKATLVCLATGFYPDHVELSWWVNGKEVHSGVCTDPQPLKEQPALNDSRYCLSSRLRVSATFWQNPRNHFRCQVQFYGLSENDEWTQDRAKPVTQIVSAEAWGRADCGFTSESYQQGVLSATILYEILLGKATLYAVLVSALVLMAMVKRKDSRGRAKRSGSGATNFSLLKQAGDVEENPGPTSMDWIWRILFLVGAATGAHSFEEVQLLESGGGLVQPGGSLRLSCAASGFSFSSYALSWVRQAPGKGLEWVSSIGENDGTTDYADAVKGRFTISRDNSKNTLYLQMNSLRVEDTAVYYCVKDGVHWGQGTLVTVSSTRIQNPDPAVYQLRDSKSSDKSVCLFTDFDSQTNVSQSKDSDVYITDKCVLDMRSMDFKSNSAVAWSNKSDFACANAFNNSIIPEDTFFPSPESSCDVKLVEKSFETDTNLNFQNLSVIGFRILLLKVAGFNLLMTLRLWSSRAKRSGSGVKQTLNFDLLKLAGDVESNPGPSRGHMTEYKPTVRLATRDDVPRAVRTLAAAFADYPATRHTVDPDRHIERVTELQELFLTRVGLDIGKVWVADDGAAVAVWTTPESVEAGAVFAEIGPRMAELSGSRLAAQQQMEGLLAPHRPKEPAWFLATVGVSPDHQGKGLGSAVVLPGVEAAERAGVPAFLETSAPRNLPFYERLGFTVTADVEVPEGPRTWCMTRKPGA

SEQ ID NO: 22875 - protein, 876 aa, Artificial Sequence
  Synthetic Polypeptide
MALPVTALLLPLALLLHAARPQLQLQESGPGLVKPSETLSLTCTVSGDSISSGDYYWGWIRQPPGKGLEWIGHIYYSGVTYYNPSLKSRVTISVDTSRNQFSLKLSSVTAADTAVYYCTREDSSNWRSRGQGTLVTVSSLEGSGGGGSGGGGSGEDLKNVFPPEVAVFEPSEAEISHTQKATLVCLATGFYPDHVELSWWVNGKEVHSGVCTDPQPLKEQPALNDSRYCLSSRLRVSATFWQNPRNHFRCQVQFYGLSENDEWTQDRAKPVTQIVSAEAWGRADCGFTSESYQQGVLSATILYEILLGKATLYAVLVSALVLMAMVKRKDSRGRAKRSGSGATNFSLLKQAGDVEENPGPTSMDWIWRILFLVGAATGAHSFEVQLLESGGGLIQPGGSLRLSCAASGFTFSSHAMTWVRQAPGKGLEWVSAISGSGDYTHYADSVKGRFTISRDNSKNTVYLQMNSLRAEDSAVYYCAKDEDGGSLLGHRGQGTLVTVSSTRIQNPDPAVYQLRDSKSSDKSVCLFTDFDSQTNVSQSKDSDVYITDKCVLDMRSMDFKSNSAVAWSNKSDFACANAFNNSIIPEDTFFPSPESSCDVKLVEKSFETDTNLNFQNLSVIGFRILLLKVAGFNLLMTLRLWSSRAKRSGSGVKQTLNFDLLKLAGDVESNPGPSRGHMTEYKPTVRLATRDDVPRAVRTLAAAFADYPATRHTVDPDRHIERVTELQELFLTRVGLDIGKVWVADDGAAVAVWTTPESVEAGAVFAEIGPRMAELSGSRLAAQQQMEGLLAPHRPKEPAWFLATVGVSPDHQGKGLGSAVVLPGVEAAERAGVPAFLETSAPRNLPFYERLGFTVTADVEVPEGPRTWCMTRKPGA

SEQ ID NO: 22876 - protein, 879 aa, Artificial Sequence
  Synthetic Polypeptide
MALPVTALLLPLALLLHAARPQVQLVESGGGLVQPGGSLRLSCAASGFTFTNHAMSWVRQAPGKGLELVSSISGNGRTTYYADSVKGRFTISRDISKNTLDLQMNSLRAEDTAVYYCAKDGGETLVDSRGQGTLVTVSSLEGSGGGGSGGGGSGEDLKNVFPPEVAVFEPSEAEISHTQKATLVCLATGFYPDHVELSWWVNGKEVHSGVCTDPQPLKEQPALNDSRYCLSSRLRVSATFWQNPRNHFRCQVQFYGLSENDEWTQDRAKPVTQIVSAEAWGRADCGFTSESYQQGVLSATILYEILLGKATLYAVLVSALVLMAMVKRKDSRGRAKRSGSGATNFSLLKQAGDVEENPGPTSMDWIWRILFLVGAATGAHSFEEVQLLESGGGLVQPGGSLRLSCAASGFTFSSYAMSWVRQAPGKGLEWVSSISGSGDYIYYADSVKGRFTISRDISKNTLYLQMNSLRAEDTAVYYCAKEGTGANSSLADYRGQGTLVTVSSTRIQNPDPAVYQLRDSKSSDKSVCLFTDFDSQTNVSQSKDSDVYITDKCVLDMRSMDFKSNSAVAWSNKSDFACANAFNNSIIPEDTFFPSPESSCDVKLVEKSFETDTNLNFQNLSVIGFRILLLKVAGFNLLMTLRLWSSRAKRSGSGVKQTLNFDLLKLAGDVESNPGPSRGHMTEYKPTVRLATRDDVPRAVRTLAAAFADYPATRHTVDPDRHIERVTELQELFLTRVGLDIGKVWVADDGAAVAVWTTPESVEAGAVFAEIGPRMAELSGSRLAAQQQMEGLLAPHRPKEPAWFLATVGVSPDHQGKGLGSAVVLPGVEAAERAGVPAFLETSAPRNLPFYERLGFTVTADVEVPEGPRTWCMTRKPGA

SEQ ID NO: 22877 - protein, 872 aa, Artificial Sequence
  Synthetic Polypeptide
MALPVTALLLPLALLLHAARPQVQLVESGGGLVQPGGSLRLSCAASGFTFTNHAMSWVRQAPGKGLELVSSISGNGRTTYYADSVKGRFTISRDISKNTLDLQMNSLRAEDTAVYYCAKDGGETLVDSRGQGTLVTVSSLEVAALEREDLKNVFPPEVAVFEPSEAEISHTQKATLVCLATGFYPDHVELSWWVNGKEVHSGVCTDPQPLKEQPALNDSRYCLSSRLRVSATFWQNPRNHFRCQVQFYGLSENDEWTQDRAKPVTQIVSAEAWGRADCGFTSESYQQGVLSATILYEILLGKATLYAVLVSALVLMAMVKRKDSRGRAKRSGSGATNFSLLKQAGDVEENPGPTSMDWIWRILFLVGAATGAHSFEEVQLLESGGGLVQPGGSLRLSCAASGFTFSSYAMSWVRQAPGKGLEWVSSISGSGDYIYYADSVKGRFTISRDISKNTLYLQMNSLRAEDTAVYYCAKEGTGANSSLADYRGQGTLVTVSSTRIQNPDPAVYQLRDSKSSDKSVCLFTDFDSQTNVSQSKDSDVYITDKCVLDMRSMDFKSNSAVAWSNKSDFACANAFNNSIIPEDTFFPSPESSCDVKLVEKSFETDTNLNFQNLSVIGFRILLLKVAGFNLLMTLRLWSSRAKRSGSGVKQTLNFDLLKLAGDVESNPGPSRGHMTEYKPTVRLATRDDVPRAVRTLAAAFADYPATRHTVDPDRHIERVTELQELFLTRVGLDIGKVWVADDGAAVAVWTTPESVEAGAVFAEIGPRMAELSGSRLAAQQQMEGLLAPHRPKEPAWFLATVGVSPDHQGKGLGSAVVLPGVEAAERAGVPAFLETSAPRNLPFYERLGFTVTADVEVPEGPRTWCMTRKPGA

SEQ ID NO: 22878 - protein, 870 aa, Artificial Sequence
  Synthetic Polypeptide
MALPVTALLLPLALLLHAARPQVQLVESGGGLVQPGGSLRLSCAASGFTFTNHAMSWVRQAPGKGLELVSSISGNGRTTYYADSVKGRFTISRDISKNTLDLQMNSLRAEDTAVYYCAKDGGETLVDSRGQGTLVTVSSLEAAAKEDLKNVFPPEVAVFEPSEAEISHTQKATLVCLATGFYPDHVELSWWVNGKEVHSGVCTDPQPLKEQPALNDSRYCLSSRLRVSATFWQNPRNHFRCQVQFYGLSENDEWTQDRAKPVTQIVSAEAWGRADCGFTSESYQQGVLSATILYEILLGKATLYAVLVSALVLMAMVKRKDSRGRAKRSGSGATNFSLLKQAGDVEENPGPTSMDWIWRILFLVGAATGAHSFEEVQLLESGGGLVQPGGSLRLSCAASGFTFSSYAMSWVRQAPGKGLEWVSSISGSGDYIYYADSVKGRFTISRDISKNTLYLQMNSLRAEDTAVYYCAKEGTGANSSLADYRGQGTLVTVSSTRIQNPDPAVYQLRDSKSSDKSVCLFTDFDSQTNVSQSKDSDVYITDKCVLDMRSMDFKSNSAVAWSNKSDFACANAFNNSIIPEDTFFPSPESSCDVKLVEKSFETDTNLNFQNLSVIGFRILLLKVAGFNLLMTLRLWSSRAKRSGSGVKQTLNFDLLKLAGDVESNPGPSRGHMTEYKPTVRLATRDDVPRAVRTLAAAFADYPATRHTVDPDRHIERVTELQELFLTRVGLDIGKVWVADDGAAVAVWTTPESVEAGAVFAEIGPRMAELSGSRLAAQQQMEGLLAPHRPKEPAWFLATVGVSPDHQGKGLGSAVVLPGVEAAERAGVPAFLETSAPRNLPFYERLGFTVTADVEVPEGPRTWCMTRKPGA

SEQ ID NO: 22879 - protein, 882 aa, Artificial Sequence
  Synthetic Polypeptide
MALPVTALLLPLALLLHAARPQVQLVESGGGLVQPGGSLRLSCAASGFTFTNHAMSWVRQAPGKGLELVSSISGNGRTTYYADSVKGRFTISRDISKNTLDLQMNSLRAEDTAVYYCAKDGGETLVDSRGQGTLVTVSSLEGGGGSGGGGSGGGGSVEDLKNVFPPEVAVFEPSKAEIAHTQKATLVCLATGFYPDHVELSWWVNGKEVHSGVCTDPQPLKEQPALNDSRYCLSSRLRVSATFWQNPRNHFRCQVQFYGLSENDEWTQDRAKPVTQIVSAEAWGRADCGITSASYHQGVLSATILYEILLGKATLYAVLVSALVLMAMVKRKDSRGRAKRSGSGATNFSLLKQAGDVEENPGPTSMDWIWRILFLVGAATGAHSFEEVQLLESGGGLVQPGGSLRLSCAASGFTFSSYAMSWVRQAPGKGLEWVSSISGSGDYIYYADSVKGRFTISRDISKNTLYLQMNSLRAEDTAVYYCAKEGTGANSSLADYRGQGTLVTVSSTRIQNPDPAVYQLRDSKSSDKSVCLFTDFDSQTNVSQSKDSDVYITDKCVLDMRSMDFKSNSAVAWSNKSDFACANAFNNSIIPEDTFFPSPESSCDVKLVEKSFETDTNLNFQNLSVIGFRILLLKVAGFNLLMTLRLWSSRAKRSGSGVKQTLNFDLLKLAGDVESNPGPSRGHMTEYKPTVRLATRDDVPRAVRTLAAAFADYPATRHTVDPDRHIERVTELQELFLTRVGLDIGKVWVADDGAAVAVWTTPESVEAGAVFAEIGPRMAELSGSRLAAQQQMEGLLAPHRPKEPAWFLATVGVSPDHQGKGLGSAVVLPGVEAAERAGVPAFLETSAPRNLPFYERLGFTVTADVEVPEGPRTWCMTRKPGA

SEQ ID NO: 22880 - protein, 847 aa, Artificial Sequence
  Synthetic Polypeptide
MALPVTALLLPLALLLHAARPQVQLVESGGGLVQPGGSLRLSCAASGFTFTNHAMSWVRQAPGKGLELVSSISGNGRTTYYADSVKGRFTISRDISKNTLDLQMNSLRAEDTAVYYCAKDGGETLVDSRGQGTLVTVSSLEGGGGSGGGGSGGGGSVEIQNPDPAVYQLRDSKSSDKSVCLFTDFDSQTNVSQSKDSDVYITDKCVLDMRSMDFKSNSAVAWSNKSDFACANAFNNSIIPEDTFFPSPESSCDVKLVEKSFETDTNLNFQNLSVIGFRILLLKVAGFNLLMTLRLWSSRAKRSGSGVKQTLNFDLLKLAGDVESNPGPTSMDWIWRILFLVGAATGAHSFEEVQLLESGGGLVQPGGSLRLSCAASGFTFSSYAMSWVRQAPGKGLEWVSSISGSGDYIYYADSVKGRFTISRDISKNTLYLQMNSLRAEDTAVYYCAKEGTGANSSLADYRGQGTLVTVSSTRIQNPDPAVYQLRDSKSSDKSVCLFTDFDSQTNVSQSKDSDVYITDKCVLDMRSMDFKSNSAVAWSNKSDFACANAFNNSIIPEDTFFPSPESSCDVKLVEKSFETDTNLNFQNLSVIGFRILLLKVAGFNLLMTLRLWSSRAKRSGSGVKQTLNFDLLKLAGDVESNPGPSRGHMTEYKPTVRLATRDDVPRAVRTLAAAFADYPATRHTVDPDRHIERVTELQELFLTRVGLDIGKVWVADDGAAVAVWTTPESVEAGAVFAEIGPRMAELSGSRLAAQQQMEGLLAPHRPKEPAWFLATVGVSPDHQGKGLGSAVVLPGVEAAERAGVPAFLETSAPRNLPFYERLGFTVTADVEVPEGPRTWCMTRKPGA

SEQ ID NO: 22881 - protein, 869 aa, Artificial Sequence
  Synthetic Polypeptide
MALPVTALLLPLALLLHAARPQLQLQESGPGLVKPSETLSLTCTVSGDSISSGDYYWGWIRQPPGKGLEWIGHIYYSGVTYYNPSLKSRVTISVDTSRNQFSLKLSSVTAADTAVYYCTREDSSNWRSRGQGTLVTVSSLEVAALEREDLKNVFPPEVAVFEPSEAEISHTQKATLVCLATGFYPDHVELSWWVNGKEVHSGVCTDPQPLKEQPALNDSRYCLSSRLRVSATFWQNPRNHFRCQVQFYGLSENDEWTQDRAKPVTQIVSAEAWGRADCGFTSESYQQGVLSATILYEILLGKATLYAVLVSALVLMAMVKRKDSRGRAKRSGSGATNFSLLKQAGDVEENPGPTSMDWIWRILFLVGAATGAHSFEVQLLESGGGLIQPGGSLRLSCAASGFTFSSHAMTWVRQAPGKGLEWVSAISGSGDYTHYADSVKGRFTISRDNSKNTVYLQMNSLRAEDSAVYYCAKDEDGGSLLGHRGQGTLVTVSSTRIQNPDPAVYQLRDSKSSDKSVCLFTDFDSQTNVSQSKDSDVYITDKCVLDMRSMDFKSNSAVAWSNKSDFACANAFNNSIIPEDTFFPSPESSCDVKLVEKSFETDTNLNFQNLSVIGFRILLLKVAGFNLLMTLRLWSSRAKRSGSGVKQTLNFDLLKLAGDVESNPGPSRGHMTEYKPTVRLATRDDVPRAVRTLAAAFADYPATRHTVDPDRHIERVTELQELFLTRVGLDIGKVWVADDGAAVAVWTTPESVEAGAVFAEIGPRMAELSGSRLAAQQQMEGLLAPHRPKEPAWFLATVGVSPDHQGKGLGSAVVLPGVEAAERAGVPAFLETSAPRNLPFYERLGFTVTADVEVPEGPRTWCMTRKPGA

SEQ ID NO: 22882 - protein, 867 aa, Artificial Sequence
  Synthetic Polypeptide
MALPVTALLLPLALLLHAARPQLQLQESGPGLVKPSETLSLTCTVSGDSISSGDYYWGWIRQPPGKGLEWIGHIYYSGVTYYNPSLKSRVTISVDTSRNQFSLKLSSVTAADTAVYYCTREDSSNWRSRGQGTLVTVSSLEAAAKEDLKNVFPPEVAVFEPSEAEISHTQKATLVCLATGFYPDHVELSWWVNGKEVHSGVCTDPQPLKEQPALNDSRYCLSSRLRVSATFWQNPRNHFRCQVQFYGLSENDEWTQDRAKPVTQIVSAEAWGRADCGFTSESYQQGVLSATILYEILLGKATLYAVLVSALVLMAMVKRKDSRGRAKRSGSGATNFSLLKQAGDVEENPGPTSMDWIWRILFLVGAATGAHSFEVQLLESGGGLIQPGGSLRLSCAASGFTFSSHAMTWVRQAPGKGLEWVSAISGSGDYTHYADSVKGRFTISRDNSKNTVYLQMNSLRAEDSAVYYCAKDEDGGSLLGHRGQGTLVTVSSTRIQNPDPAVYQLRDSKSSDKSVCLFTDFDSQTNVSQSKDSDVYITDKCVLDMRSMDFKSNSAVAWSNKSDFACANAFNNSIIPEDTFFPSPESSCDVKLVEKSFETDTNLNFQNLSVIGFRILLLKVAGFNLLMTLRLWSSRAKRSGSGVKQTLNFDLLKLAGDVESNPGPSRGHMTEYKPTVRLATRDDVPRAVRTLAAAFADYPATRHTVDPDRHIERVTELQELFLTRVGLDIGKVWVADDGAAVAVWTTPESVEAGAVFAEIGPRMAELSGSRLAAQQQMEGLLAPHRPKEPAWFLATVGVSPDHQGKGLGSAVVLPGVEAAERAGVPAFLETSAPRNLPFYERLGFTVTADVEVPEGPRTWCMTRKPGA

SEQ ID NO: 22883 - protein, 879 aa, Artificial Sequence
  Synthetic Polypeptide
MALPVTALLLPLALLLHAARPQLQLQESGPGLVKPSETLSLTCTVSGDSISSGDYYWGWIRQPPGKGLEWIGHIYYSGVTYYNPSLKSRVTISVDTSRNQFSLKLSSVTAADTAVYYCTREDSSNWRSRGQGTLVTVSSLEGGGGSGGGGSGGGGSVEDLKNVFPPEVAVFEPSKAEIAHTQKATLVCLATGFYPDHVELSWWVNGKEVHSGVCTDPQPLKEQPALNDSRYCLSSRLRVSATFWQNPRNHFRCQVQFYGLSENDEWTQDRAKPVTQIVSAEAWGRADCGITSASYHQGVLSATILYEILLGKATLYAVLVSALVLMAMVKRKDSRGRAKRSGSGATNFSLLKQAGDVEENPGPTSMDWIWRILFLVGAATGAHSFEVQLLESGGGLIQPGGSLRLSCAASGFTFSSHAMTWVRQAPGKGLEWVSAISGSGDYTHYADSVKGRFTISRDNSKNTVYLQMNSLRAEDSAVYYCAKDEDGGSLLGHRGQGTLVTVSSTRIQNPDPAVYQLRDSKSSDKSVCLFTDFDSQTNVSQSKDSDVYITDKCVLDMRSMDFKSNSAVAWSNKSDFACANAFNNSIIPEDTFFPSPESSCDVKLVEKSFETDTNLNFQNLSVIGFRILLLKVAGFNLLMTLRLWSSRAKRSGSGVKQTLNFDLLKLAGDVESNPGPSRGHMTEYKPTVRLATRDDVPRAVRTLAAAFADYPATRHTVDPDRHIERVTELQELFLTRVGLDIGKVWVADDGAAVAVWTTPESVEAGAVFAEIGPRMAELSGSRLAAQQQMEGLLAPHRPKEPAWFLATVGVSPDHQGKGLGSAVVLPGVEAAERAGVPAFLETSAPRNLPFYERLGFTVTADVEVPEGPRTWCMTRKPGA

SEQ ID NO: 22884 - protein, 846 aa, Artificial Sequence
  Synthetic Polypeptide
MALPVTALLLPLALLLHAARPQLQLQESGPGLVKPSETLSLTCTVSGDSISSGDYYWGWIRQPPGKGLEWIGHIYYSGVTYYNPSLKSRVTISVDTSRNQFSLKLSSVTAADTAVYYCTREDSSNWRSRGQGTLVTVSSLEGGGGSGGGGSGGGGSVEIQNPDPAVYQLRDSKSSDKSVCLFTDFDSQTNVSQSKDSDVYITDKCVLDMRSMDFKSNSAVAWSNKSDFACANAFNNSIIPEDTFFPSPESSCDVKLVEKSFETDTNLNFQNLSVIGFRILLLKVAGFNLLMTLRLWSSSSRAKRSGSGVKQTLNFDLLKLAGDVESNPGPTSMDWIWRILFLVGAATGAHSFEVQLLESGGGLIQPGGSLRLSCAASGFTFSSHAMTWVRQAPGKGLEWVSAISGSGDYTHYADSVKGRFTISRDNSKNTVYLQMNSLRAEDSAVYYCAKDEDGGSLLGHRGQGTLVTVSSTRIQNPDPAVYQLRDSKSSDKSVCLFTDFDSQTNVSQSKDSDVYITDKCVLDMRSMDFKSNSAVAWSNKSDFACANAFNNSIIPEDTFFPSPESSCDVKLVEKSFETDTNLNFQNLSVIGFRILLLKVAGFNLLMTLRLWSSRAKRSGSGVKQTLNFDLLKLAGDVESNPGPSRGHMTEYKPTVRLATRDDVPRAVRTLAAAFADYPATRHTVDPDRHIERVTELQELFLTRVGLDIGKVWVADDGAAVAVWTTPESVEAGAVFAEIGPRMAELSGSRLAAQQQMEGLLAPHRPKEPAWFLATVGVSPDHQGKGLGSAVVLPGVEAAERAGVPAFLETSAPRNLPFYERLGFTVTADVEVPEGPRTWCMTRKPGA

SEQ ID NO: 22885 - protein, 995 aa, Artificial Sequence
  Synthetic Polypeptide
MALPVTALLLPLALLLHAARPQVQLVESGGGLVQPGGSLRLSCAASGFTFTNHAMSWVRQAPGKGLELVSSISGNGRTTYYADSVKGRFTISRDISKNTLDLQMNSLRAEDTAVYYCAKDGGETLVDSRGQGTLVTVSSLESGGGGSFEEVKLQESGPGLVAPSQSLSVTCTVSGVSLPDYGVSWIRQPPRKGLEWLGVIWGSETTYYNSALKSRLTIIKDNSKSQVFLKMNSLQTDDTAIYYCAKHYYYGGSYAMDYWGQGTSVTVSSLEDLKNVFPPEVAVFEPSEAEISHTQKATLVCLATGFYPDHVELSWWVNGKEVHSGVCTDPQPLKEQPALNDSRYCLSSRLRVSATFWQNPRNHFRCQVQFYGLSENDEWTQDRAKPVTQIVSAEAWGRADCGFTSESYQQGVLSATILYEILLGKATLYAVLVSALVLMAMVKRKDSRGRAKRSGSGATNFSLLKQAGDVEENPGPTSATMALPVTALLLPLALLLHAARPDIQMTQTTSSLSASLGDRVTISCRASQDISKYLNWYQQKPDGTVKLLIYHTSRLHSGVPSRFSGSGSGTDYSLTISNLEQEDIATYFCQQGNTLPYTFGGGTKLEITTREQKLISEEDGSGIQNPDPAVYQLRDSKSSDKSVCLFTDFDSQTNVSQSKDSDVYITDKCVLDMRSMDFKSNSAVAWSNKSDFACANAFNNSIIPEDTFFPSPESSCDVKLVEKSFETDTNLNFQNLSVIGFRILLLKVAGFNLLMTLRLWSSRAKRSGSGVKQTLNFDLLKLAGDVESNPGPSRGHMTEYKPTVRLATRDDVPRAVRTLAAAFADYPATRHTVDPDRHIERVTELQELFLTRVGLDIGKVWVADDGAAVAVWTTPESVEAGAVFAEIGPRMAELSGSRLAAQQQMEGLLAPHRPKEPAWFLATVGVSPDHQGKGLGSAVVLPGVEAAERAGVPAFLETSAPRNLPFYERLGFTVTADVEVPEGPRTWCMTRKPGA

SEQ ID NO: 22886 - protein, 873 aa, Artificial Sequence
  Synthetic Polypeptide
MALPVTALLLPLALLLHAARPQVQLVESGGGLVQPGGSLRLSCAASGFTFTNHAMSWVRQAPGKGLELVSSISGNGRTTYYADSVKGRFTISRDISKNTLDLQMNSLRAEDTAVYYCAKDGGETLVDSRGQGTLVTVSSLEPGGGGSPEDLKNVFPPEVAVFEPSEAEISHTQKATLVCLATGFYPDHVELSWWVNGKEVHSGVCTDPQPLKEQPALNDSRYCLSSRLRVSATFWQNPRNHFRCQVQFYGLSENDEWTQDRAKPVTQIVSAEAWGRADCGFTSESYQQGVLSATILYEILLGKATLYAVLVSALVLMAMVKRKDSRGRAKRSGSGATNFSLLKQAGDVEENPGPTSMDWIWRILFLVGAATGAHSFEEVQLLESGGGLVQPGGSLRLSCAASGFTFSSYAMSWVRQAPGKGLEWVSSISGSGDYIYYADSVKGRFTISRDISKNTLYLQMNSLRAEDTAVYYCAKEGTGANSSLADYRGQGTLVTVSSTRIQNPDPAVYQLRDSKSSDKSVCLFTDFDSQTNVSQSKDSDVYITDKCVLDMRSMDFKSNSAVAWSNKSDFACANAFNNSIIPEDTFFPSPESSCDVKLVEKSFETDTNLNFQNLSVIGFRILLLKVAGFNLLMTLRLWSSRAKRSGSGVKQTLNFDLLKLAGDVESNPGPSRGHMTEYKPTVRLATRDDVPRAVRTLAAAFADYPATRHTVDPDRHIERVTELQELFLTRVGLDIGKVWVADDGAAVAVWTTPESVEAGAVFAEIGPRMAELSGSRLAAQQQMEGLLAPHRPKEPAWFLATVGVSPDHQGKGLGSAVVLPGVEAAERAGVPAFLETSAPRNLPFYERLGFTVTADVEVPEGPRTWCMTRKPGA

SEQ ID NO: 22887 - protein, 857 aa, Artificial Sequence
  Synthetic Polypeptide
MALPVTALLLPLALLLHAARPQLQLQESGPGLVKPSETLSLTCTVSGDSISSGDYYWGWIRQPPGKGLEWIGHIYYSGVTYYNPSLKSRVTISVDTSRNQFSLKLSSVTAADTAVYYCTREDSSNWRSRGQGTLVTVSSLEGQPKANPTVTLFPPSSEELQANKATLVCLISDFYPGAVTVAWKADGSPVKAGVETTKPSKQSNNKYAASSYLSLTPEQWKSHRSYSCQVTHEGSTVEKTVAPTECSPIKTDVITMDPKDNCSKDANDTLLLQLTNTSAYYMYLLLLLKSVVYFAIITCCLLRRTAFCCNGEKSRAKRSGSGATNFSLLKQAGDVEENPGPTSMDWIWRILFLVGAATGAHSFEVQLLESGGGLIQPGGSLRLSCAASGFTFSSHAMTWVRQAPGKGLEWVSAISGSGDYTHYADSVKGRFTISRDNSKNTVYLQMNSLRAEDSAVYYCAKDEDGGSLLGHRGQGTLVTVSSTRIQNPDPAVYQLRDSKSSDKSVCLFTDFDSQTNVSQSKDSDVYITDKCVLDMRSMDFKSNSAVAWSNKSDFACANAFNNSIIPEDTFFPSPESSCDVKLVEKSFETDTNLNFQNLSVIGFRILLLKVAGFNLLMTLRLWSSRAKRSGSGVKQTLNFDLLKLAGDVESNPGPSRGHMTEYKPTVRLATRDDVPRAVRTLAAAFADYPATRHTVDPDRHIERVTELQELFLTRVGLDIGKVWVADDGAAVAVWTTPESVEAGAVFAEIGPRMAELSGSRLAAQQQMEGLLAPHRPKEPAWFLATVGVSPDHQGKGLGSAVVLPGVEAAERAGVPAFLETSAPRNLPFYERLGFTVTADVEVPEGPRTWCMTRKPGA

SEQ ID NO: 22888 - protein, 843 aa, Artificial Sequence
  Synthetic Polypeptide
MALPVTALLLPLALLLHAARPQLQLQESGPGLVKPSETLSLTCTVSGDSISSGDYYWGWIRQPPGKGLEWIGHIYYSGVTYYNPSLKSRVTISVDTSRNQFSLKLSSVTAADTAVYYCTREDSSNWRSRGQGTLVTVSSLEGQPKANPTVTLFPPSSEELQANKATLVCLISDFYPGAVTVAWKADGSPVKAGVETTKPSKQSNNKYAASSYLSLTPEQWKSHRSYSCQVTHEGSTVEKTVAPTECSGRADCGFTSESYQQGVLSATILYEILLGKATLYAVLVSALVLMAMVKRKDSRGRAKRSGSGATNFSLLKQAGDVEENPGPTSMDWIWRILFLVGAATGAHSFEVQLLESGGGLIQPGGSLRLSCAASGFTFSSHAMTWVRQAPGKGLEWVSAISGSGDYTHYADSVKGRFTISRDNSKNTVYLQMNSLRAEDSAVYYCAKDEDGGSLLGHRGQGTLVTVSSTRIQNPDPAVYQLRDSKSSDKSVCLFTDFDSQTNVSQSKDSDVYITDKCVLDMRSMDFKSNSAVAWSNKSDFACANAFNNSIIPEDTFFPSPESSCDVKLVEKSFETDTNLNFQNLSVIGFRILLLKVAGFNLLMTLRLWSSRAKRSGSGVKQTLNFDLLKLAGDVESNPGPSRGHMTEYKPTVRLATRDDVPRAVRTLAAAFADYPATRHTVDPDRHIERVTELQELFLTRVGLDIGKVWVADDGAAVAVWTTPESVEAGAVFAEIGPRMAELSGSRLAAQQQMEGLLAPHRPKEPAWFLATVGVSPDHQGKGLGSAVVLPGVEAAERAGVPAFLETSAPRNLPFYERLGFTVTADVEVPEGPRTWCMTRKPGA

SEQ ID NO: 22889 - protein, 860 aa, Artificial Sequence
  Synthetic Polypeptide
MALPVTALLLPLALLLHAARPQVQLVESGGGLVQPGGSLRLSCAASGFTFTNHAMSWVRQAPGKGLELVSSISGNGRTTYYADSVKGRFTISRDISKNTLDLQMNSLRAEDTAVYYCAKDGGETLVDSRGQGTLVTVSSLEGQPKANPTVTLFPPSSEELQANKATLVCLISDFYPGAVTVAWKADGSPVKAGVETTKPSKQSNNKYAASSYLSLTPEQWKSHRSYSCQVTHEGSTVEKTVAPTECSPIKTDVITMDPKDNCSKDANDTLLLQLTNTSAYYMYLLLLLKSVVYFAIITCCLLRRTAFCCNGEKSRAKRSGSGATNFSLLKQAGDVEENPGPTSMDWIWRILFLVGAATGAHSFEEVQLLESGGGLVQPGGSLRLSCAASGFTFSSYAMSWVRQAPGKGLEWVSSISGSGDYIYYADSVKGRFTISRDISKNTLYLQMNSLRAEDTAVYYCAKEGTGANSSLADYRGQGTLVTVSSTRIQNPDPAVYQLRDSKSSDKSVCLFTDFDSQTNVSQSKDSDVYITDKCVLDMRSMDFKSNSAVAWSNKSDFACANAFNNSIIPEDTFFPSPESSCDVKLVEKSFETDTNLNFQNLSVIGFRILLLKVAGFNLLMTLRLWSSRAKRSGSGVKQTLNFDLLKLAGDVESNPGPSRGHMTEYKPTVRLATRDDVPRAVRTLAAAFADYPATRHTVDPDRHIERVTELQELFLTRVGLDIGKVWVADDGAAVAVWTTPESVEAGAVFAEIGPRMAELSGSRLAAQQQMEGLLAPHRPKEPAWFLATVGVSPDHQGKGLGSAVVLPGVEAAERAGVPAFLETSAPRNLPFYERLGFTVTADVEVPEGPRTWCMTRKPGA

SEQ ID NO: 22890 - protein, 846 aa, Artificial Sequence
  Synthetic Polypeptide
MALPVTALLLPLALLLHAARPQVQLVESGGGLVQPGGSLRLSCAASGFTFTNHAMSWVRQAPGKGLELVSSISGNGRTTYYADSVKGRFTISRDISKNTLDLQMNSLRAEDTAVYYCAKDGGETLVDSRGQGTLVTVSSLEGQPKANPTVTLFPPSSEELQANKATLVCLISDFYPGAVTVAWKADGSPVKAGVETTKPSKQSNNKYAASSYLSLTPEQWKSHRSYSCQVTHEGSTVEKTVAPTECSGRADCGFTSESYQQGVLSATILYEILLGKATLYAVLVSALVLMAMVKRKDSRGRAKRSGSGATNFSLLKQAGDVEENPGPTSMDWIWRILFLVGAATGAHSFEEVQLLESGGGLVQPGGSLRLSCAASGFTFSSYAMSWVRQAPGKGLEWVSSISGSGDYIYYADSVKGRFTISRDISKNTLYLQMNSLRAEDTAVYYCAKEGTGANSSLADYRGQGTLVTVSSTRIQNPDPAVYQLRDSKSSDKSVCLFTDFDSQTNVSQSKDSDVYITDKCVLDMRSMDFKSNSAVAWSNKSDFACANAFNNSIIPEDTFFPSPESSCDVKLVEKSFETDTNLNFQNLSVIGFRILLLKVAGFNLLMTLRLWSSRAKRSGSGVKQTLNFDLLKLAGDVESNPGPSRGHMTEYKPTVRLATRDDVPRAVRTLAAAFADYPATRHTVDPDRHIERVTELQELFLTRVGLDIGKVWVADDGAAVAVWTTPESVEAGAVFAEIGPRMAELSGSRLAAQQQMEGLLAPHRPKEPAWFLATVGVSPDHQGKGLGSAVVLPGVEAAERAGVPAFLETSAPRNLPFYERLGFTVTADVEVPEGPRTWCMTRKPGA

SEQ ID NO: 22891 - protein, 665 aa, Artificial Sequence
  Synthetic Polypeptide
MALPVTALLLPLALLLHAARPQLQLQESGPGLVKPSETLSLTCTVSGDSISSGDYYWGWIRQPPGKGLEWIGHIYYSGVTYYNPSLKSRVTISVDTSRNQFSLKLSSVTAADTAVYYCTREDSSNWRSRGQGTLVTVSSLESGGGGSFEQVQLVESGGGLVQPGGSLRLSCAASGFTFTNHAMSWVRQAPGKGLELVSSISGNGRTTYYADSVKGRFTISRDISKNTLDLQMNSLRAEDTAVYYCAKDGGETLVDSRGQGTLVTVSSTRASTKGPSVFPLAPSSKSTSGGTAALGCLVKDYFPEPVTVSWNSGALTSGVHTFPAVLQSSGLYSLSSVVTVPSSSLGTQTYICNVNHKPSNTKVDKRVEPKSCIPEDTFFPSPESSCDVKLVEKSFETDTNLNFQNLSVIGFRILLLKVAGFNLLMTLRLWSSRAKRSGSGVKQTLNFDLLKLAGDVESNPGPSRGHMTEYKPTVRLATRDDVPRAVRTLAAAFADYPATRHTVDPDRHIERVTELQELFLTRVGLDIGKVWVADDGAAVAVWTTPESVEAGAVFAEIGPRMAELSGSRLAAQQQMEGLLAPHRPKEPAWFLATVGVSPDHQGKGLGSAVVLPGVEAAERAGVPAFLETSAPRNLPFYERLGFTVTADVEVPEGPRTWCMTRKPGA

SEQ ID NO: 22892 - protein, 567 aa, Artificial Sequence
  Synthetic Polypeptide
MALPVTALLLPLALLLHAARPQLQLQESGPGLVKPSETLSLTCTVSGDSISSGDYYWGWIRQPPGKGLEWIGHIYYSGVTYYNPSLKSRVTISVDTSRNQFSLKLSSVTAADTAVYYCTREDSSNWRSRGQGTLVTVSSLEGKPIPNPLLGLDSTGSGEDLKNVFPPEVAVFEPSKAEIAHTQKATLVCLATGFYPDHVELSWWVNGKEVHSGVCTDPQPLKEQPALNDSRYCLSSRLRVSATFWQNPRNHFRCQVQFYGLSENDEWTQDRAKPVTQIVSAEAWGRADCGITSASYHQGVLSATILYEILLGKATLYAVLVSALVLMAMVKRKDSRGRAKRSGSGATNFSLLKQAGDVEENPGPTRGHMTEYKPTVRLATRDDVPRAVRTLAAAFADYPATRHTVDPDRHIERVTELQELFLTRVGLDIGKVWVADDGAAVAVWTTPESVEAGAVFAEIGPRMAELSGSRLAAQQQMEGLLAPHRPKEPAWFLATVGVSPDHQGKGLGSAVVLPGVEAAERAGVPAFLETSAPRNLPFYERLGFTVTADVEVPEGPRTWCMTRKPGA

SEQ ID NO: 22893 - protein, 676 aa, Artificial Sequence
  Synthetic Polypeptide
MALPVTALLLPLALLLHAARPQLQLQESGPGLVKPSETLSLTCTVSGDSISSGDYYWGWIRQPPGKGLEWIGHIYYSGVTYYNPSLKSRVTISVDTSRNQFSLKLSSVTAADTAVYYCTREDSSNWRSRGQGTLVTVSSLESGGGGSFEEVQLLESGGGLVQPGGSLRLSCAASGFTFSSYAMSWVRQAPGKGLEWVSSISGSGDYIYYADSVKGRFTISRDISKNTLYLQMNSLRAEDTAVYYCAKEGTGANSSLADYRGQGTLVTVSSTRASTKGPSVFPLAPSSKSTSGGTAALGCLVKDYFPEPVTVSWNSGALTSGVHTFPAVLQSSGLYSLSSVVTVPSSSLGTQTYICNVNHKPSNTKVDKRVEPKSCEVKTDSTDHVKPKETENTKQPSKSCHKPKAIVHTEKVNMMSLTVLGLRMLFAKTVAVNFLLTAKLFFLRAKRSGSGVKQTLNFDLLKLAGDVESNPGPSRGHMTEYKPTVRLATRDDVPRAVRTLAAAFADYPATRHTVDPDRHIERVTELQELFLTRVGLDIGKVWVADDGAAVAVWTTPESVEAGAVFAEIGPRMAELSGSRLAAQQQMEGLLAPHRPKEPAWFLATVGVSPDHQGKGLGSAVVLPGVEAAERAGVPAFLETSAPRNLPFYERLGFTVTADVEVPEGPRTWCMTRKPGA

SEQ ID NO: 22894 - protein, 685 aa, Artificial Sequence
  Synthetic Polypeptide
MALPVTALLLPLALLLHAARPEVQLVESGGGVVQPGRSLRLSCAASGFSFSGYGMHWVRQAPGKGLEWVAYISYDGSNKYYADSVKGRFTISRDNSKNTLYLQMNSLRAEDTAVYYCAKDPAWGLRLGESSSYDFDIWGQGTMVTVSSGSGGGGSGGGGSGGGGSFEVQLLESGGGLVQPGGSLRLSCAASGFSFSSYALSWVRQAPGKGLEWVSSIGENDGTTDYADAVKGRFTISRDNSKNTLYLQMNSLRVEDTAVYYCVKDGVHWGQGTLVTVSSTRASTKGPSVFPLAPSSKSTSGGTAALGCLVKDYFPEPVTVSWNSGALTSGVHTFPAVLQSSGLYSLSSVVTVPSSSLGTQTYICNVNHKPSNTKVDKRVEPKSCEVKTDSTDHVKPKETENTKQPSKSCHKPKAIVHTEKVNMMSLTVLGLRMLFAKTVAVNFLLTAKLFFLRAKRSGSGVKQTLNFDLLKLAGDVESNPGPSRGHMTEYKPTVRLATRDDVPRAVRTLAAAFADYPATRHTVDPDRHIERVTELQELFLTRVGLDIGKVWVADDGAAVAVWTTPESVEAGAVFAEIGPRMAELSGSRLAAQQQMEGLLAPHRPKEPAWFLATVGVSPDHQGKGLGSAVVLPGVEAAERAGVPAFLETSAPRNLPFYERLGFTVTADVEVPEGPRTWCMTRKPGA

SEQ ID NO: 22895 - protein, 668 aa, Artificial Sequence
  Synthetic Polypeptide
MALPVTALLLPLALLLHAARPQLQLQESGPGLVKPSETLSLTCTVSGDSISSGDYYWGWIRQPPGKGLEWIGHIYYSGVTYYNPSLKSRVTISVDTSRNQFSLKLSSVTAADTAVYYCTREDSSNWRSRGQGTLVTVSSLESGGGGSFEEVQLLESGGGLVQPGGSLRLSCAASGFTFSSYAMSWVRQAPGKGLEWVSSISGSGDYIYYADSVKGRFTISRDISKNTLYLQMNSLRAEDTAVYYCAKEGTGANSSLADYRGQGTLVTVSSTRASTKGPSVFPLAPSSKSTSGGTAALGCLVKDYFPEPVTVSWNSGALTSGVHTFPAVLQSSGLYSLSSVVTVPSSSLGTQTYICNVNHKPSNTKVDKRVEPKSCIPEDTFFPSPESSCDVKLVEKSFETDTNLNFQNLSVIGFRILLLKVAGFNLLMTLRLWSSRAKRSGSGVKQTLNFDLLKLAGDVESNPGPSRGHMTEYKPTVRLATRDDVPRAVRTLAAAFADYPATRHTVDPDRHIERVTELQELFLTRVGLDIGKVWVADDGAAVAVWTTPESVEAGAVFAEIGPRMAELSGSRLAAQQQMEGLLAPHRPKEPAWFLATVGVSPDHQGKGLGSAVVLPGVEAAERAGVPAFLETSAPRNLPFYERLGFTVTADVEVPEGPRTWCMTRKPGA

SEQ ID NO: 22896 - protein, 677 aa, Artificial Sequence
  Synthetic Polypeptide
MALPVTALLLPLALLLHAARPEVQLVESGGGVVQPGRSLRLSCAASGFSFSGYGMHWVRQAPGKGLEWVAYISYDGSNKYYADSVKGRFTISRDNSKNTLYLQMNSLRAEDTAVYYCAKDPAWGLRLGESSSYDFDIWGQGTMVTVSSGSGGGGSGGGGSGGGGSFEVQLLESGGGLVQPGGSLRLSCAASGFSFSSYALSWVRQAPGKGLEWVSSIGENDGTTDYADAVKGRFTISRDNSKNTLYLQMNSLRVEDTAVYYCVKDGVHWGQGTLVTVSSTRASTKGPSVFPLAPSSKSTSGGTAALGCLVKDYFPEPVTVSWNSGALTSGVHTFPAVLQSSGLYSLSSVVTVPSSSLGTQTYICNVNHKPSNTKVDKRVEPKSCIPEDTFFPSPESSCDVKLVEKSFETDTNLNFQNLSVIGFRILLLKVAGFNLLMTLRLWSSRAKRSGSGVKQTLNFDLLKLAGDVESNPGPSRGHMTEYKPTVRLATRDDVPRAVRTLAAAFADYPATRHTVDPDRHIERVTELQELFLTRVGLDIGKVWVADDGAAVAVWTTPESVEAGAVFAEIGPRMAELSGSRLAAQQQMEGLLAPHRPKEPAWFLATVGVSPDHQGKGLGSAVVLPGVEAAERAGVPAFLETSAPRNLPFYERLGFTVTADVEVPEGPRTWCMTRKPGA

SEQ ID NO: 22897 - protein, 665 aa, Artificial Sequence
  Synthetic Polypeptide
MALPVTALLLPLALLLHAARPQLQLQESGPGLVKPSETLSLTCTVSGDSISSGDYYWGWIRQPPGKGLEWIGHIYYSGVTYYNPSLKSRVTISVDTSRNQFSLKLSSVTAADTAVYYCTREDSSNWRSRGQGTLVTVSSLESGGGGSFEQLQLQESGPGLVKPSETLSLTCTVSGGSISSGDYYWGWIRQPPGKGLEWIGHIYYSGATYYNPSLKSRVTISVDTSRNQFSLKLSSVTAADTAVYYCTRDDSSNWRSRGQGTLVTVSSTRASTKGPSVFPLAPSSKSTSGGTAALGCLVKDYFPEPVTVSWNSGALTSGVHTFPAVLQSSGLYSLSSVVTVPSSSLGTQTYICNVNHKPSNTKVDKRVEPKSCIPEDTFFPSPESSCDVKLVEKSFETDTNLNFQNLSVIGFRILLLKVAGFNLLMTLRLWSSRAKRSGSGVKQTLNFDLLKLAGDVESNPGPSRGHMTEYKPTVRLATRDDVPRAVRTLAAAFADYPATRHTVDPDRHIERVTELQELFLTRVGLDIGKVWVADDGAAVAVWTTPESVEAGAVFAEIGPRMAELSGSRLAAQQQMEGLLAPHRPKEPAWFLATVGVSPDHQGKGLGSAVVLPGVEAAERAGVPAFLETSAPRNLPFYERLGFTVTADVEVPEGPRTWCMTRKPGA

SEQ ID NO: 22898 - protein, 343 aa, Artificial Sequence
  Synthetic Polypeptide
MALPVTALLLPLALLLHAARPQLQLQESGPGLVKPSETLSLTCTVSGDSISSGDYYWGWIRQPPGKGLEWIGHIYYSGVTYYNPSLKSRVTISVDTSRNQFSLKLSSVTAADTAVYYCTREDSSNWRSRGQGTLVTVSSLESGGGGSFEEVQLLESGGGLVQPGGSLRLSCAASGFTFSSYAMSWVRQAPGKGLEWVSSISGSGDYIYYADSVKGRFTISRDISKNTLYLQMNSLRAEDTAVYYCAKEGTGANSSLADYRGQGTLVTVSSTRDKTHTCPPCPAIPEDTFFPSPESSCDVKLVEKSFETDTNLNFQNLSVIGFRILLLKVAGFNLLMTLRLWSS

SEQ ID NO: 22899 - protein, 340 aa, Artificial Sequence
  Synthetic Polypeptide
MALPVTALLLPLALLLHAARPQLQLQESGPGLVKPSETLSLTCTVSGDSISSGDYYWGWIRQPPGKGLEWIGHIYYSGVTYYNPSLKSRVTISVDTSRNQFSLKLSSVTAADTAVYYCTREDSSNWRSRGQGTLVTVSSLDSGGGGSFEQLQLQESGPGLVKPSETLSLTCTVSGGSISSGDYYWGWIRQPPGKGLEWIGHIYYSGATYYNPSLKSRVTISVDTSRNQFSLKLSSVTAADTAVYYCTRDDSSNWRSRGQGTLVTVSSTRDKTHTCPPCPAIPEDTFFPSPESSCDVKLVEKSFETDTNLNFQNLSVIGFRILLLKVAGFNLLMTLRLWSS

SEQ ID NO: 22900 - protein, 565 aa, Artificial Sequence
  Synthetic Polypeptide
MALPVTALLLPLALLLHAARPQLQLQESGPGLVKPSETLSLTCTVSGDSISSGDYYWGWIRQPPGKGLEWIGHIYYSGVTYYNPSLKSRVTISVDTSRNQFSLKLSSVTAADTAVYYCTREDSSNWRSRGQGTLVTVSSLEGSGGGGSGGGGSGEDLKNVFPPEVAVFEPSEAEISHTQKATLVCLATGFYPDHVELSWWVNGKEVHSGVCTDPQPLKEQPALNDSRYCLSSRLRVSATFWQNPRNHFRCQVQFYGLSENDEWTQDRAKPVTQIVSAEAWGRADCGFTSESYQQGVLSATILYEILLGKATLYAVLVSALVLMAMVKRKDSRGRAKRSGSGATNFSLLKQAGDVEENPGPTSMDWIWRILFLVGAATGAHSFEVQLLESGGGLIQPGGSLRLSCAASGFTFSSHAMTWVRQAPGKGLEWVSAISGSGDYTHYADSVKGRFTISRDNSKNTVYLQMNSLRAEDSAVYYCAKDEDGGSLLGHRGQGTLVTVSSTRGSIPEDTFFPSPESSCDVKLVEKSFETDTNLNFQNLSVIGFRILLLKVAGFNLLMTLRLWSS

SEQ ID NO: 22901 - protein, 9 aa, Artificial Sequence
  Synthetic Polypeptide
GGGGGGGGG

SEQ ID NO: 22902 - protein, 568 aa, Artificial Sequence
  Synthetic Polypeptide
MALPVTALLLPLALLLHAARPQVQLVESGGGLVQPGGSLRLSCAASGFTFTNHAMSWVRQAPGKGLELVSSISGNGRTTYYADSVKGRFTISRDISKNTLDLQMNSLRAEDTAVYYCAKDGGETLVDSRGQGTLVTVSSLEGSGGGGSGGGGSGEDLKNVFPPEVAVFEPSEAEISHTQKATLVCLATGFYPDHVELSWWVNGKEVHSGVCTDPQPLKEQPALNDSRYCLSSRLRVSATFWQNPRNHFRCQVQFYGLSENDEWTQDRAKPVTQIVSAEAWGRADCGFTSESYQQGVLSATILYEILLGKATLYAVLVSALVLMAMVKRKDSRGRAKRSGSGATNFSLLKQAGDVEENPGPTSMDWIWRILFLVGAATGAHSFEEVQLLESGGGLVQPGGSLRLSCAASGFTFSSYAMSWVRQAPGKGLEWVSSISGSGDYIYYADSVKGRFTISRDISKNTLYLQMNSLRAEDTAVYYCAKEGTGANSSLADYRGQGTLVTVSSTRGSIPEDTFFPSPESSCDVKLVEKSFETDTNLNFQNLSVIGFRILLLKVAGFNLLMTLRLWSS

SEQ ID NO: 22903 - protein, 675 aa, Artificial Sequence
  Synthetic Polypeptide
MALPVTALLLPLALLLHAARPDIQMTQTTSSLSASLGDRVTISCRASQDISKYLNWYQQKPDGTVKLLIYHTSRLHSGVPSRFSGSGSGTDYSLTISNLEQEDIATYFCQQGNTLPYTFGGGTKLEITGGGGSGGGGSGGGGSEVKLQESGPGLVAPSQSLSVTCTVSGVSLPDYGVSWIRQPPRKGLEWLGVIWGSETTYYNSALKSRLTIIKDNSKSQVFLKMNSLQTDDTAIYYCAKHYYYGGSYAMDYWGQGTSVTVSSLEDLKNVFPPEVAVFEPSEAEISHTQKATLVCLATGFYPDHVELSWWVNGKEVHSGVCTDPQPLKEQPALNDSRYCLSSRLRVSATFWQNPRNHFRCQVQFYGLSENDEWTQDRAKPVTQIVSAEAWGRADCGFTSESYQQGVLSATILYEILLGKATLYAVLVSALVLMAMVKRKDSRGRAKRSGSGATNFSLLKQAGDVEENPGPTSMDWIWRILFLVGAATGAHSFEVQLLESGGGLIQPGGSLRLSCAASGFTFSSHAMTWVRQAPGKGLEWVSAISGSGDYTHYADSVKGRFTISRDNSKNTVYLQMNSLRAEDSAVYYCAKDEDGGSLLGHRGQGTLVTVSSTRGSIPEDTFFPSPESSCDVKLVEKSFETDTNLNFQNLSVIGFRILLLKVAGFNLLMTLRLWSS

SEQ ID NO: 22904 - protein, 739 aa, Artificial Sequence
  Synthetic Polypeptide
MALPVTALLLPLALLLHAARPQLQLQESGPGLVKPSETLSLTCTVSGDSISSGDYYWGWIRQPPGKGLEWIGHIYYSGVTYYNPSLKSRVTISVDTSRNQFSLKLSSVTAADTAVYYCTREDSSNWRSRGQGTLVTVSSLEGSGRADCGFTSESYQQGVLSATILYEILLGKATLYAVLVSALVLMAMVKRKDSRGRAKRSGSGATNFSLLKQAGDVEENPGPTSMDWIWRILFLVGAATGAHSFEVQLLESGGGLIQPGGSLRLSCAASGFTFSSHAMTWVRQAPGKGLEWVSAISGSGDYTHYADSVKGRFTISRDNSKNTVYLQMNSLRAEDSAVYYCAKDEDGGSLLGHRGQGTLVTVSSTRIQNPDPAVYQLRDSKSSDKSVCLFTDFDSQTNVSQSKDSDVYITDKCVLDMRSMDFKSNSAVAWSNKSDFACANAFNNSIIPEDTFFPSPESSCDVKLVEKSFETDTNLNFQNLSVIGFRILLLKVAGFNLLMTLRLWSSRAKRSGSGVKQTLNFDLLKLAGDVESNPGPSRGHMTEYKPTVRLATRDDVPRAVRTLAAAFADYPATRHTVDPDRHIERVTELQELFLTRVGLDIGKVWVADDGAAVAVWTTPESVEAGAVFAEIGPRMAELSGSRLAAQQQMEGLLAPHRPKEPAWFLATVGVSPDHQGKGLGSAVVLPGVEAAERAGVPAFLETSAPRNLPFYERLGFTVTADVEVPEGPRTWCMTRKPGA

SEQ ID NO: 22905 - protein, 748 aa, Artificial Sequence
  Synthetic Polypeptide
MALPVTALLLPLALLLHAARPQLQLQESGPGLVKPSETLSLTCTVSGDSISSGDYYWGWIRQPPGKGLEWIGHIYYSGVTYYNPSLKSRVTISVDTSRNQFSLKLSSVTAADTAVYYCTREDSSNWRSRGQGTLVTVSSLEDKTHTCPPCPAGRADCGFTSESYQQGVLSATILYEILLGKATLYAVLVSALVLMAMVKRKDSRGRAKRSGSGATNFSLLKQAGDVEENPGPTSMDWIWRILFLVGAATGAHSFEVQLLESGGGLIQPGGSLRLSCAASGFTFSSHAMTWVRQAPGKGLEWVSAISGSGDYTHYADSVKGRFTISRDNSKNTVYLQMNSLRAEDSAVYYCAKDEDGGSLLGHRGQGTLVTVSSTRIQNPDPAVYQLRDSKSSDKSVCLFTDFDSQTNVSQSKDSDVYITDKCVLDMRSMDFKSNSAVAWSNKSDFACANAFNNSIIPEDTFFPSPESSCDVKLVEKSFETDTNLNFQNLSVIGFRILLLKVAGFNLLMTLRLWSSRAKRSGSGVKQTLNFDLLKLAGDVESNPGPSRGHMTEYKPTVRLATRDDVPRAVRTLAAAFADYPATRHTVDPDRHIERVTELQELFLTRVGLDIGKVWVADDGAAVAVWTTPESVEAGAVFAEIGPRMAELSGSRLAAQQQMEGLLAPHRPKEPAWFLATVGVSPDHQGKGLGSAVVLPGVEAAERAGVPAFLETSAPRNLPFYERLGFTVTADVEVPEGPRTWCMTRKPGA

SEQ ID NO: 22906 - protein, 862 aa, Artificial Sequence
  Synthetic Polypeptide
MALPVTALLLPLALLLHAARPQLQLQESGPGLVKPSETLSLTCTVSGDSISSGDYYWGWIRQPPGKGLEWIGHIYYSGVTYYNPSLKSRVTISVDTSRNQFSLKLSSVTAADTAVYYCTREDSSNWRSRGQGTLVTVSSLEDLKNVFPPEVAVFEPSKAEIAHTQKATLVCLATGFYPDHVELSWWVNGKEVHSGVCTDPQPLKEQPALNDSRYCLSSRLRVSATFWQNPRNHFRCQVQFYGLSENDEWTQDRAKPVTQIVSAEAWGRADCGITSASYHQGVLSATILYEILLGKATLYAVLVSALVLMAMVKRKDSRGRAKRSGSGATNFSLLKQAGDVEENPGPTSMDWIWRILFLVGAATGAHSFEVQLLESGGGLIQPGGSLRLSCAASGFTFSSHAMTWVRQAPGKGLEWVSAISGSGDYTHYADSVKGRFTISRDNSKNTVYLQMNSLRAEDSAVYYCAKDEDGGSLLGHRGQGTLVTVSSTRIQNPDPAVYQLRDSKSSDKSVCLFTDFDSQTNVSQSKDSDVYITDKCVLDMRSMDFKSNSAVAWSNKSDFACANAFNNSIIPEDTFFPSPESSCDVKLVEKSFETDTNLNFQNLSVIGFRILLLKVAGFNLLMTLRLWSSRAKRSGSGVKQTLNFDLLKLAGDVESNPGPSRGHMTEYKPTVRLATRDDVPRAVRTLAAAFADYPATRHTVDPDRHIERVTELQELFLTRVGLDIGKVWVADDGAAVAVWTTPESVEAGAVFAEIGPRMAELSGSRLAAQQQMEGLLAPHRPKEPAWFLATVGVSPDHQGKGLGSAVVLPGVEAAERAGVPAFLETSAPRNLPFYERLGFTVTADVEVPEGPRTWCMTRKPGA

SEQ ID NO: 22907 - protein, 865 aa, Artificial Sequence
  Synthetic Polypeptide
MALPVTALLLPLALLLHAARPQVQLVESGGGLVQPGGSLRLSCAASGFTFTNHAMSWVRQAPGKGLELVSSISGNGRTTYYADSVKGRFTISRDISKNTLDLQMNSLRAEDTAVYYCAKDGGETLVDSRGQGTLVTVSSLEDLKNVFPPEVAVFEPSKAEIAHTQKATLVCLATGFYPDHVELSWWVNGKEVHSGVCTDPQPLKEQPALNDSRYCLSSRLRVSATFWQNPRNHFRCQVQFYGLSENDEWTQDRAKPVTQIVSAEAWGRADCGITSASYHQGVLSATILYEILLGKATLYAVLVSALVLMAMVKRKDSRGRAKRSGSGATNFSLLKQAGDVEENPGPTSMDWIWRILFLVGAATGAHSFEEVQLLESGGGLVQPGGSLRLSCAASGFTFSSYAMSWVRQAPGKGLEWVSSISGSGDYIYYADSVKGRFTISRDISKNTLYLQMNSLRAEDTAVYYCAKEGTGANSSLADYRGQGTLVTVSSTRIQNPDPAVYQLRDSKSSDKSVCLFTDFDSQTNVSQSKDSDVYITDKCVLDMRSMDFKSNSAVAWSNKSDFACANAFNNSIIPEDTFFPSPESSCDVKLVEKSFETDTNLNFQNLSVIGFRILLLKVAGFNLLMTLRLWSSRAKRSGSGVKQTLNFDLLKLAGDVESNPGPSRGHMTEYKPTVRLATRDDVPRAVRTLAAAFADYPATRHTVDPDRHIERVTELQELFLTRVGLDIGKVWVADDGAAVAVWTTPESVEAGAVFAEIGPRMAELSGSRLAAQQQMEGLLAPHRPKEPAWFLATVGVSPDHQGKGLGSAVVLPGVEAAERAGVPAFLETSAPRNLPFYERLGFTVTADVEVPEGPRTWCMTRKPGA

SEQ ID NO: 22908 - protein, 1020 aa, Artificial Sequence
  Synthetic Polypeptide
MALPVTALLLPLALLLHAARPEVQLVESGGGLVQPGGSLRLSCAASGFNIKDTCIGWVRRAPGKEEELVAKICKYSGHTRYADSVKGRFTISADTSKNTAYLQMNSLRAEDTAVYYCAAVSVRDGHYNYWGQGTTVTVSSLEGKPIPNPLLGLDSTGSGEDLKNVFPPEVAVFEPSKAEIAHTQKATLVCLATGFYPDHVELSWWVNGKEVHSGVCTDPQPLKEQPALNDSRYCLSSRLRVSATFWQNPRNHFRCQVQFYGLSENDEWTQDRAKPVTQIVSAEAWGRADCGITSASYHQGVLSATILYEILLGKATLYAVLVSALVLMAMVKRKDSRGRAKRSGSGATNFSLLKQAGDVEENPGPTSTMALPVTALLLPLALLLHAARPDIQMTQSPSSLSASVGDRVTITCKASDHINNWLAWYQQKPGQAPKLLIYGATTLETGVPSRFSGSGSGTDYTLTISSLQPEDFATYYCQQSWNTPWTFGQGTKLEIKRGGGGSGGGGSGGGGSQVQLQQPGAELVKPGASVKMSCKASGYAFSSYWINWMKQKPGQGLEWIGQIYPGDGDTNYNGKFKGRATLTADTSSSTAYMQLSSLTSEDSAVYFCARSITTVVGCAMDYWGQGTSVTVSSTREQKLISEEDGSGIQNPDPAVYQLRDSKSSDKSVCLFTDFDSQTNVSQSKDSDVYITDKCVLDMRSMDFKSNSAVAWSNKSDFACANAFNNSIIPEDTFFPSSDVPCDVKLVEKSFETDTNLNFQNLSVIGFRILLLKVAGFNLLMTLRLWSSRAKRSGSGVKQTLNFDLLKLAGDVESNPGPSRGHMTEYKPTVRLATRDDVPRAVRTLAAAFADYPATRHTVDPDRHIERVTELQELFLTRVGLDIGKVWVADDGAAVAVWTTPESVEAGAVFAEIGPRMAELSGSRLAAQQQMEGLLAPHRPKEPAWFLATVGVSPDHQGKGLGSAVVLPGVEAAERAGVPAFLETSAPRNLPFYERLGFTVTADVEVPEGPRTWCMTRKPGA

SEQ ID NO: 22909 - protein, 1150 aa, Artificial Sequence
  Synthetic Polypeptide
MALPVTALLLPLALLLHAARPDIQMTQTTSSLSASLGDRVTISCRASQDISKYLNWYQQKPDGTVKLLIYHTSRLHSGVPSRFSGSGSGTDYSLTISNLEQEDIATYFCQQGNTLPYTFGGGTKLEITGGGGSGGGGSGGGGSEVKLQESGPGLVAPSQSLSVTCTVSGVSLPDYGVSWIRQPPRKGLEWLGVIWGSETTYYNSALKSRLTIIKDNSKSQVFLKMNSLQTDDTAIYYCAKHYYYGGSYAMDYWGQGTSVTVSSLEGKPIPNPLLGLDSTGSGEDLKNVFPPEVAVFEPSKAEIAHTQKATLVCLATGFYPDHVELSWWVNGKEVHSGVCTDPQPLKEQPALNDSRYCLSSRLRVSATFWQNPRNHFRCQVQFYGLSENDEWTQDRAKPVTQIVSAEAWGRADCGITSASYHQGVLSATILYEILLGKATLYAVLVSALVLMAMVKRKDSRGRAKRSGSGATNFSLLKQAGDVEENPGPTSTMDWIWRILFLVGAATGAHSEVQLLESGGGLVQPGGSLRLSCAASGFSFSSYALSWVRQAPGKGLEWVSSIGENDGTTDYADAVKGRFTISRDNSKNTLYLQMNSLRVEDTAVYYCVKDGVHWGQGTLVTVSSGSGGGGSGGGGSFEVQLVESGGGVVQPGRSLRLSCAASGFSFSGYGMHWVRQAPGKGLEWVAYISYDGSNKYYADSVKGRFTISRDNSKNTLYLQMNSLRAEDTAVYYCAKDPAWGLRLGESSSYDFDIWGQGTMVTVSSTREQKLISEEDGSGIQNPDPAVYQLRDSKSSDKSVCLFTDFDSQTNVSQSKDSDVYITDKCVLDMRSMDFKSNSAVAWSNKSDFACANAFNNSIIPEDTFFPSSDVPCDVKLVEKSFETDTNLNFQNLSVIGFRILLLKVAGFNLLMTLRLWSSRAKRSGSGVKQTLNFDLLKLAGDVESNPGPSRGHMTEYKPTVRLATRDDVPRAVRTLAAAFADYPATRHTVDPDRHIERVTELQELFLTRVGLDIGKVWVADDGAAVAVWTTPESVEAGAVFAEIGPRMAELSGSRLAAQQQMEGLLAPHRPKEPAWFLATVGVSPDHQGKGLGSAVVLPGVEAAERAGVPAFLETSAPRNLPFYERLGFTVTADVEVPEGPRTWCMTRKPGA

SEQ ID NO: 22910 - protein, 986 aa, Artificial Sequence
  Synthetic Polypeptide
MALPVTALLLPLALLLHAARPDIQMTQTTSSLSASLGDRVTISCRASQDISKYLNWYQQKPDGTVKLLIYHTSRLHSGVPSRFSGSGSGTDYSLTISNLEQEDIATYFCQQGNTLPYTFGGGTKLEITGGGGSGGGGSGGGGSEVKLQESGPGLVAPSQSLSVTCTVSGVSLPDYGVSWIRQPPRKGLEWLGVIWGSETTYYNSALKSRLTIIKDNSKSQVFLKMNSLQTDDTAIYYCAKHYYYGGSYAMDYWGQGTSVTVSSLEDLKNVFPPEVAVFEPSEAEISHTQKATLVCLATGFYPDHVELSWWVNGKEVHSGVCTDPQPLKEQPALNDSRYCLSSRLRVSATFWQNPRNHFRCQVQFYGLSENDEWTQDRAKPVTQIVSAEAWGRADCGFTSESYQQGVLSATILYEILLGKATLYAVLVSALVLMAMVKRKDSRGRAKRSGSGATNFSLLKQAGDVEENPGPTSMDWIWRILFLVGAATGAHSFEVQLLESGGGLIQPGGSLRLSCAASGFTFSSHAMTWVRQAPGKGLEWVSAISGSGDYTHYADSVKGRFTISRDNSKNTVYLQMNSLRAEDSAVYYCAKDEDGGSLLGHRGQGTLVTVSSTRIQNPDPAVYQLRDSKSSDKSVCLFTDFDSQTNVSQSKDSDVYITDKCVLDMRSMDFKSNSAVAWSNKSDFACANAFNNSIIPEDTFFPSPESSCDVKLVEKSFETDTNLNFQNLSVIGFRILLLKVAGFNLLMTLRLWSSRAKRSGSGVKQTLNFDLLKLAGDVESNPGPSRGHMTEYKPTVRLATRDDVPRAVRTLAAAFADYPATRHTVDPDRHIERVTELQELFLTRVGLDIGKVWVADDGAAVAVWTTPESVEAGAVFAEIGPRMAELSGSRLAAQQQMEGLLAPHRPKEPAWFLATVGVSPDHQGKGLGSAVVLPGVEAAERAGVPAFLETSAPRNLPFYERLGFTVTADVEVPEGPRTWCMTRKPGA

SEQ ID NO: 22911 - protein, 888 aa, Artificial Sequence; identical to SEQ ID NO: 17511
  Synthetic Polypeptide

SEQ ID NO: 22912 - protein, 866 aa, Artificial Sequence; identical to SEQ ID NO: 17502
  Synthetic Polypeptide

SEQ ID NO: 22913 - protein, 891 aa, Artificial Sequence; identical to SEQ ID NO: 22863
  Synthetic Polypeptide

SEQ ID NO: 22914 - protein, 869 aa, Artificial Sequence
  Synthetic Polypeptide
MALPVTALLLPLALLLHAARPQVQLVESGGGLVQPGGSLRLSCAASGFTFTNHAMSWVRQAPGKGLELVSSISGNGRTTYYADSVKGRFTISRDISKNTLDLQMNSLRAEDTAVYYCAKDGGETLVDSRGQGTLVTVSSLEGQPKANPTVTLFPPSSEELQANKATLVCLISDFYPGAVTVAWKADGSPVKAGVETTKPSKQSNNKYAASSYLSLTPEQWKSHRSYSCQVTHEGSTVEKTVAPTECSGRADCGFTSESYQQGVLSATILYEILLGKATLYAVLVSALVLMAMVKRKDSRGRAKRSGSGATNFSLLKQAGDVEENPGPTSMDWIWRILFLVGAATGAHSFEEVQLLESGGGLVQPGGSLRLSCAASGFTFSSYAMSWVRQAPGKGLEWVSSISGSGDYIYYADSVKGRFTISRDISKNTLYLQMNSLRAEDTAVYYCAKEGTGANSSLADYRGQGTLVTVSSTRASTKGPSVFPLAPSSKSTSGGTAALGCLVKDYFPEPVTVSWNSGALTSGVHTFPAVLQSSGLYSLSSVVTVPSSSLGTQTYICNVNHKPSNTKVDKRVEPKSCIPEDTFFPSPESSCDVKLVEKSFETDTNLNFQNLSVIGFRILLLKVAGFNLLMTLRLWSSRAKRSGSGVKQTLNFDLLKLAGDVESNPGPSRGHMTEYKPTVRLATRDDVPRAVRTLAAAFADYPATRHTVDPDRHIERVTELQELFLTRVGLDIGKVWVADDGAAVAVWTTPESVEAGAVFAEIGPRMAELSGSRLAAQQQMEGLLAPHRPKEPAWFLATVGVSPDHQGKGLGSAVVLPGVEAAERAGVPAFLETSAPRNLPFYERLGFTVTADVEVPEGPRTWCMTRKPGA

SEQ ID NO: 22915 - protein, 9 aa, Artificial Sequence
  Synthetic Polypeptide
GGGGGGGGG

SEQ ID NO: 22916 - protein, 852 aa, Artificial Sequence
  Synthetic Polypeptide
MALPVTALLLPLALLLHAARPDIQMTQTTSSLSASLGDRVTISCRASQDISKYLNWYQQKPDGTVKLLIYHTSRLHSGVPSRFSGSGSGTDYSLTISNLEQEDIATYFCQQGNTLPYTFGGGTKLEITLEDLKNVFPPEVAVFEPSEAEISHTQKATLVCLATGFYPDHVELSWWVNGKEVHSGVCTDPQPLKEQPALNDSRYCLSSRLRVSATFWQNPRNHFRCQVQFYGLSENDEWTQDRAKPVTQIVSAEAWGRADCGFTSESYQQGVLSATILYEILLGKATLYAVLVSALVLMAMVKRKDSRGRAKRSGSGATNFSLLKQAGDVEENPGPTSMDWIWRILFLVGAATGAHSFEVKLQESGPGLVAPSQSLSVTCTVSGVSLPDYGVSWIRQPPRKGLEWLGVIWGSETTYYNSALKSRLTIIKDNSKSQVFLKMNSLQTDDTAIYYCAKHYYYGGSYAMDYWGQGTSVTVSSTRIQNPDPAVYQLRDSKSSDKSVCLFTDFDSQTNVSQSKDSDVYITDKCVLDMRSMDFKSNSAVAWSNKSDFACANAFNNSIIPEDTFFPSPESSCDVKLVEKSFETDTNLNFQNLSVIGFRILLLKVAGFNLLMTLRLWSSRAKRSGSGVKQTLNFDLLKLAGDVESNPGPSRGHMTEYKPTVRLATRDDVPRAVRTLAAAFADYPATRHTVDPDRHIERVTELQELFLTRVGLDIGKVWVADDGAAVAVWTTPESVEAGAVFAEIGPRMAELSGSRLAAQQQMEGLLAPHRPKEPAWFLATVGVSPDHQGKGLGSAVVLPGVEAAERAGVPAFLETSAPRNLPFYERLGFTVTADVEVPEGPRTWCMTRKPGA

SEQ ID NO: 22917 - protein, 852 aa, Artificial Sequence
  Synthetic Polypeptide
MALPVTALLLPLALLLHAARPDIQMTQTTSSLSASLGDRVTISCRASQDISKYLNWYQQKPDGTVKLLIYHTSRLHSGVPSRFSGSGSGTDYSLTISNLEQEDIATYFCQQGNTLPYTFGGGTKLEITLEDLKNVFPPEVAVFEPSKAEIAHTQKATLVCLATGFYPDHVELSWWVNGKEVHSGVCTDPQPLKEQPALNDSRYCLSSRLRVSATFWQNPRNHFRCQVQFYGLSENDEWTQDRAKPVTQIVSAEAWGRADCGITSASYHQGVLSATILYEILLGKATLYAVLVSALVLMAMVKRKDSRGRAKRSGSGATNFSLLKQAGDVEENPGPTSMDWIWRILFLVGAATGAHSFEVKLQESGPGLVAPSQSLSVTCTVSGVSLPDYGVSWIRQPPRKGLEWLGVIWGSETTYYNSALKSRLTIIKDNSKSQVFLKMNSLQTDDTAIYYCAKHYYYGGSYAMDYWGQGTSVTVSSTRIQNPDPAVYQLRDSKSSDKSVCLFTDFDSQTNVSQSKDSDVYITDKCVLDMRSMDFKSNSAVAWSNKSDFACANAFNNSIIPEDTFFPSSDVPCDVKLVEKSFETDTNLNFQNLSVIGFRILLLKVAGFNLLMTLRLWSSRAKRSGSGVKQTLNFDLLKLAGDVESNPGPSRGHMTEYKPTVRLATRDDVPRAVRTLAAAFADYPATRHTVDPDRHIERVTELQELFLTRVGLDIGKVWVADDGAAVAVWTTPESVEAGAVFAEIGPRMAELSGSRLAAQQQMEGLLAPHRPKEPAWFLATVGVSPDHQGKGLGSAVVLPGVEAAERAGVPAFLETSAPRNLPFYERLGFTVTADVEVPEGPRTWCMTRKPGA

SEQ ID NO: 22918 - protein, 881 aa, Artificial Sequence
  Synthetic Polypeptide
MALPVTALLLPLALLLHAARPDIQMTQSPSSLSASVGDRVTITCKASDHINNWLAWYQQKPGQAPKLLIYGATTLETGVPSRFSGSGSGTDYTLTISSLQPEDFATYYCQQSWNTPWTFGQGTKLEIKRLEGQPKANPTVTLFPPSSEELQANKATLVCLISDFYPGAVTVAWKADGSPVKAGVETTKPSKQSNNKYAASSYLSLTPEQWKSHRSYSCQVTHEGSTVEKTVAPTECSPIKTDVITMDPKDNCSKDANDTLLLQLTNTSAYYMYLLLLLKSVVYFAIITCCLLRRTAFCCNGEKSRAKRSGSGATNFSLLKQAGDVEENPGPTSMDWIWRILFLVGAATGAHSFEQVQLQQPGAELVKPGASVKMSCKASGYAFSSYWINWMKQKPGQGLEWIGQIYPGDGDTNYNGKFKGRATLTADTSSSTAYMQLSSLTSEDSAVYFCARSITTVVGCAMDYWGQGTSVTVSSTRASTKGPSVFPLAPSSKSTSGGTAALGCLVKDYFPEPVTVSWNSGALTSGVHTFPAVLQSSGLYSLSSVVTVPSSSLGTQTYICNVNHKPSNTKVDKRVEPKSCEVKTDSTDHVKPKETENTKQPSKSCHKPKAIVHTEKVNMMSLTVLGLRMLFAKTVAVNFLLTAKLFFLRAKRSGSGVKQTLNFDLLKLAGDVESNPGPSRGHMTEYKPTVRLATRDDVPRAVRTLAAAFADYPATRHTVDPDRHIERVTELQELFLTRVGLDIGKVWVADDGAAVAVWTTPESVEAGAVFAEIGPRMAELSGSRLAAQQQMEGLLAPHRPKEPAWFLATVGVSPDHQGKGLGSAVVLPGVEAAERAGVPAFLETSAPRNLPFYERLGFTVTADVEVPEGPRTWCMTRKPGA

SEQ ID NO: 22919 - protein, 994 aa, Artificial Sequence
  Synthetic Polypeptide
MALPVTALLLPLALLLHAARPDIQMTQSPSSLSASVGDRVTITCKASDHINNWLAWYQQKPGQAPKLLIYGATTLETGVPSRFSGSGSGTDYTLTISSLQPEDFATYYCQQSWNTPWTFGQGTKLEIKRLEDLKNVFPPEVAVFEPSEAEISHTQKATLVCLATGFYPDHVELSWWVNGKEVHSGVCTDPQPLKEQPALNDSRYCLSSRLRVSATFWQNPRNHFRCQVQFYGLSENDEWTQDRAKPVTQIVSAEAWGRADCGFTSESYQQGVLSATILYEILLGKATLYAVLVSALVLMAMVKRKDSRGRAKRSGSGATNFSLLKQAGDVEENPGPTSATMDWIWRILFLVGAATGAHSGPQVQLQESGGGLAQAGGSLRLSCAASGRTFSMGWFRQAPGKEREFVAAITYSGGSPYYASSVRGRFTISRDNAKNTVYLQMNSLKPEDTAVYYCAANPTYGSDWNAENWGQGTQVTVSSGSGGGGSGGGGSGGGGSFEQVQLQQPGAELVKPGASVKMSCKASGYAFSSYWINWMKQKPGQGLEWIGQIYPGDGDTNYNGKFKGRATLTADTSSSTAYMQLSSLTSEDSAVYFCARSITTVVGCAMDYWGQGTSVTVSSTRIQNPDPAVYQLRDSKSSDKSVCLFTDFDSQTNVSQSKDSDVYITDKCVLDMRSMDFKSNSAVAWSNKSDFACANAFNNSIIPEDTFFPSPESSCDVKLVEKSFETDTNLNFQNLSVIGFRILLLKVAGFNLLMTLRLWSSRAKRSGSGVKQTLNFDLLKLAGDVESNPGPSRGHMTEYKPTVRLATRDDVPRAVRTLAAAFADYPATRHTVDPDRHIERVTELQELFLTRVGLDIGKVWVADDGAAVAVWTTPESVEAGAVFAEIGPRMAELSGSRLAAQQQMEGLLAPHRPKEPAWFLATVGVSPDHQGKGLGSAVVLPGVEAAERAGVPAFLETSAPRNLPFYERLGFTVTADVEVPEGPRTWCMTRKPGA

SEQ ID NO: 22920 - protein, 994 aa, Artificial Sequence; identical to SEQ ID NO: 22919
  Synthetic Polypeptide

SEQ ID NO: 22921 - protein, 994 aa, Artificial Sequence
  Synthetic Polypeptide
MALPVTALLLPLALLLHAARPDIQMTQSPSSLSASVGDRVTITCKASDHINNWLAWYQQKPGQAPKLLIYGATTLETGVPSRFSGSGSGTDYTLTISSLQPEDFATYYCQQSWNTPWTFGQGTKLEIKRLEDLKNVFPPEVAVFEPSKAEIAHTQKATLVCLATGFYPDHVELSWWVNGKEVHSGVCTDPQPLKEQPALNDSRYCLSSRLRVSATFWQNPRNHFRCQVQFYGLSENDEWTQDRAKPVTQIVSAEAWGRADCGITSASYHQGVLSATILYEILLGKATLYAVLVSALVLMAMVKRKDSRGRAKRSGSGATNFSLLKQAGDVEENPGPTSATMDWIWRILFLVGAATGAHSGPQVQLQESGGGLAQAGGSLRLSCAASGRTFSMGWFRQAPGKEREFVAAITYSGGSPYYASSVRGRFTISRDNAKNTVYLQMNSLKPEDTAVYYCAANPTYGSDWNAENWGQGTQVTVSSGSGGGGSGGGGSGGGGSFEQVQLQQPGAELVKPGASVKMSCKASGYAFSSYWINWMKQKPGQGLEWIGQIYPGDGDTNYNGKFKGRATLTADTSSSTAYMQLSSLTSEDSAVYFCARSITTVVGCAMDYWGQGTSVTVSSTRIQNPDPAVYQLRDSKSSDKSVCLFTDFDSQTNVSQSKDSDVYITDKCVLDMRSMDFKSNSAVAWSNKSDFACANAFNNSIIPEDTFFPSSDVPCDVKLVEKSFETDTNLNFQNLSVIGFRILLLKVAGFNLLMTLRLWSSRAKRSGSGVKQTLNFDLLKLAGDVESNPGPSRGHMTEYKPTVRLATRDDVPRAVRTLAAAFADYPATRHTVDPDRHIERVTELQELFLTRVGLDIGKVWVADDGAAVAVWTTPESVEAGAVFAEIGPRMAELSGSRLAAQQQMEGLLAPHRPKEPAWFLATVGVSPDHQGKGLGSAVVLPGVEAAERAGVPAFLETSAPRNLPFYERLGFTVTADVEVPEGPRTWCMTRKPGA

SEQ ID NO: 22922 - protein, 995 aa, Artificial Sequence
  Synthetic Polypeptide
MALPVTALLLPLALLLHAARPDIQMTQSPSSLSASVGDRVTITCKASDHINNWLAWYQQKPGQAPKLLIYGATTLETGVPSRFSGSGSGTDYTLTISSLQPEDFATYYCQQSWNTPWTFGQGTKLEIKRLEIQNPDPAVYQLRDSKSSDKSVCLFTDFDSQTNVSQSKDSDVYITDKCVLDMRSMDFKSNSAVAWSNKSDFACANAFNNSIIPEDTFFPSSDVPCDVKLVEKSFETDTNLNFQNLSVIGFRILLLKVAGFNLLMTLRLWSSRAKRSGSGVKQTLNFDLLKLAGDVESNPGPTSATMDWIWRILFLVGAATGAHSGPQVQLQESGGGLAQAGGSLRLSCAASGRTFSMGWFRQAPGKEREFVAAITYSGGSPYYASSVRGRFTISRDNAKNTVYLQMNSLKPEDTAVYYCAANPTYGSDWNAENWGQGTQVTVSSGSGGGGSGGGGSGGGGSFEQVQLQQPGAELVKPGASVKMSCKASGYAFSSYWINWMKQKPGQGLEWIGQIYPGDGDTNYNGKFKGRATLTADTSSSTAYMQLSSLTSEDSAVYFCARSITTVVGCAMDYWGQGTSVTVSSTREDLKNVFPPEVAVFEPSKAEIAHTQKATLVCLATGFYPDHVELSWWVNGKEVHSGVCTDPQPLKEQPALNDSRYCLSSRLRVSATFWQNPRNHFRCQVQFYGLSENDEWTQDRAKPVTQIVSAEAWGRADCGITSASYHQGVLSATILYEILLGKATLYAVLVSALVLMAMVKRKDSRGRAKRSGSGATNFSLLKQAGDVEENPGPSRGHMTEYKPTVRLATRDDVPRAVRTLAAAFADYPATRHTVDPDRHIERVTELQELFLTRVGLDIGKVWVADDGAAVAVWTTPESVEAGAVFAEIGPRMAELSGSRLAAQQQMEGLLAPHRPKEPAWFLATVGVSPDHQGKGLGSAVVLPGVEAAERAGVPAFLETSAPRNLPFYERLGFTVTADVEVPEGPRTWCMTRKPGA

SEQ ID NO: 22923 - protein, 992 aa, Artificial Sequence
  Synthetic Polypeptide
MALPVTALLLPLALLLHAARPQVQLVESGGGLVQPGGSLRLSCAASGFTFTNHAMSWVRQAPGKGLELVSSISGNGRTTYYADSVKGRFTISRDISKNTLDLQMNSLRAEDTAVYYCAKDGGETLVDSRGQGTLVTVSSGTGGGGSGGGGSGGGGSEFDIQMTQSPSSLSASVGDRVTITCKASDHINNWLAWYQQKPGQAPKLLIYGATTLETGVPSRFSGSGSGTDYTLTISSLQPEDFATYYCQQSWNTPWTFGQGTKLEIKRLEDLKNVFPPEVAVFEPSEAEISHTQKATLVCLATGFYPDHVELSWWVNGKEVHSGVCTDPQPLKEQPALNDSRYCLSSRLRVSATFWQNPRNHFRCQVQFYGLSENDEWTQDRAKPVTQIVSAEAWGRADCGFTSESYQQGVLSATILYEILLGKATLYAVLVSALVLMAMVKRKDSRGRAKRSGSGATNFSLLKQAGDVEENPGPTSMDWIWRILFLVGAATGAHSFEQVQLQQPGAELVKPGASVKMSCKASGYAFSSYWINWMKQKPGQGLEWIGQIYPGDGDTNYNGKFKGRATLTADTSSSTAYMQLSSLTSEDSAVYFCARSITTVVGCAMDYWGQGTSVTVSSTRIQNPDPAVYQLRDSKSSDKSVCLFTDFDSQTNVSQSKDSDVYITDKCVLDMRSMDFKSNSAVAWSNKSDFACANAFNNSIIPEDTFFPSPESSCDVKLVEKSFETDTNLNFQNLSVIGFRILLLKVAGFNLLMTLRLWSSRAKRSGSGVKQTLNFDLLKLAGDVESNPGPSRGHMTEYKPTVRLATRDDVPRAVRTLAAAFADYPATRHTVDPDRHIERVTELQELFLTRVGLDIGKVWVADDGAAVAVWTTPESVEAGAVFAEIGPRMAELSGSRLAAQQQMEGLLAPHRPKEPAWFLATVGVSPDHQGKGLGSAVVLPGVEAAERAGVPAFLETSAPRNLPFYERLGFTVTADVEVPEGPRTWCMTRKPGA

SEQ ID NO: 22924 - protein, 964 aa, Artificial Sequence
  Synthetic Polypeptide
MALPVTALLLPLALLLHAARPMLPAPKNLVVSRITEDSARLSWTAPDAAFDSFPIRYIETLIWGEAIWLDVPGSERSYDLTGLKPGTEYAVVITGVKGGRFSSPLVASFTTGTGGGGSGGGGSGGGGSEFDIQMTQSPSSLSASVGDRVTITCKASDHINNWLAWYQQKPGQAPKLLIYGATTLETGVPSRFSGSGSGTDYTLTISSLQPEDFATYYCQQSWNTPWTFGQGTKLEIKRLEDLKNVFPPEVAVFEPSEAEISHTQKATLVCLATGFYPDHVELSWWVNGKEVHSGVCTDPQPLKEQPALNDSRYCLSSRLRVSATFWQNPRNHFRCQVQFYGLSENDEWTQDRAKPVTQIVSAEAWGRADCGFTSESYQQGVLSATILYEILLGKATLYAVLVSALVLMAMVKRKDSRGRAKRSGSGATNFSLLKQAGDVEENPGPTSMDWIWRILFLVGAATGAHSFEQVQLQQPGAELVKPGASVKMSCKASGYAFSSYWINWMKQKPGQGLEWIGQIYPGDGDTNYNGKFKGRATLTADTSSSTAYMQLSSLTSEDSAVYFCARSITTVVGCAMDYWGQGTSVTVSSTRIQNPDPAVYQLRDSKSSDKSVCLFTDFDSQTNVSQSKDSDVYITDKCVLDMRSMDFKSNSAVAWSNKSDFACANAFNNSIIPEDTFFPSPESSCDVKLVEKSFETDTNLNFQNLSVIGFRILLLKVAGFNLLMTLRLWSSRAKRSGSGVKQTLNFDLLKLAGDVESNPGPSRGHMTEYKPTVRLATRDDVPRAVRTLAAAFADYPATRHTVDPDRHIERVTELQELFLTRVGLDIGKVWVADDGAAVAVWTTPESVEAGAVFAEIGPRMAELSGSRLAAQQQMEGLLAPHRPKEPAWFLATVGVSPDHQGKGLGSAVVLPGVEAAERAGVPAFLETSAPRNLPFYERLGFTVTADVEVPEGPRTWCMTRKPGA

SEQ ID NO: 22925 - protein, 992 aa, Artificial Sequence
  Synthetic Polypeptide
MALPVTALLLPLALLLHAARPQLQLQESGPGLVKPSETLSLTCTVSGDSISSGDYYWGWIRQPPGKGLEWIGHIYYSGVTYYNPSLKSRVTISVDTSRNQFSLKLSSVTAADTAVYYCTREDSSNWRSRGQGTLVTVSSGTGGGGSGGGGSGGGGSEFDIQMTQSPSSLSASVGDRVTITCKASDHINNWLAWYQQKPGQAPKLLIYGATTLETGVPSRFSGSGSGTDYTLTISSLQPEDFATYYCQQSWNTPWTFGQGTKLEIKRLEDLKNVFPPEVAVFEPSEAEISHTQKATLVCLATGFYPDHVELSWWVNGKEVHSGVCTDPQPLKEQPALNDSRYCLSSRLRVSATFWQNPRNHFRCQVQFYGLSENDEWTQDRAKPVTQIVSAEAWGRADCGFTSESYQQGVLSATILYEILLGKATLYAVLVSALVLMAMVKRKDSRGRAKRSGSGATNFSLLKQAGDVEENPGPTSMDWIWRILFLVGAATGAHSFEQVQLQQPGAELVKPGASVKMSCKASGYAFSSYWINWMKQKPGQGLEWIGQIYPGDGDTNYNGKFKGRATLTADTSSSTAYMQLSSLTSEDSAVYFCARSITTVVGCAMDYWGQGTSVTVSSTRIQNPDPAVYQLRDSKSSDKSVCLFTDFDSQTNVSQSKDSDVYITDKCVLDMRSMDFKSNSAVAWSNKSDFACANAFNNSIIPEDTFFPSPESSCDVKLVEKSFETDTNLNFQNLSVIGFRILLLKVAGFNLLMTLRLWSSRAKRSGSGVKQTLNFDLLKLAGDVESNPGPSRGHMTEYKPTVRLATRDDVPRAVRTLAAAFADYPATRHTVDPDRHIERVTELQELFLTRVGLDIGKVWVADDGAAVAVWTTPESVEAGAVFAEIGPRMAELSGSRLAAQQQMEGLLAPHRPKEPAWFLATVGVSPDHQGKGLGSAVVLPGVEAAERAGVPAFLETSAPRNLPFYERLGFTVTADVEVPEGPRTWCMTRKPGA

SEQ ID NO: 22926 - protein, 995 aa, Artificial Sequence
  Synthetic Polypeptide
MALPVTALLLPLALLLHAARPEVQLLESGGGLVQPGGSLRLSCAASGFTFSSYAMSWVRQAPGKGLEWVSSISGSGDYIYYADSVKGRFTISRDISKNTLYLQMNSLRAEDTAVYYCAKEGTGANSSLADYRGQGTLVTVSSGTGGGGSGGGGSGGGGSEFDIQMTQSPSSLSASVGDRVTITCKASDHINNWLAWYQQKPGQAPKLLIYGATTLETGVPSRFSGSGSGTDYTLTISSLQPEDFATYYCQQSWNTPWTFGQGTKLEIKRLEDLKNVFPPEVAVFEPSEAEISHTQKATLVCLATGFYPDHVELSWWVNGKEVHSGVCTDPQPLKEQPALNDSRYCLSSRLRVSATFWQNPRNHFRCQVQFYGLSENDEWTQDRAKPVTQIVSAEAWGRADCGFTSESYQQGVLSATILYEILLGKATLYAVLVSALVLMAMVKRKDSRGRAKRSGSGATNFSLLKQAGDVEENPGPTSMDWIWRILFLVGAATGAHSFEQVQLQQPGAELVKPGASVKMSCKASGYAFSSYWINWMKQKPGQGLEWIGQIYPGDGDTNYNGKFKGRATLTADTSSSTAYMQLSSLTSEDSAVYFCARSITTVVGCAMDYWGQGTSVTVSSTRIQNPDPAVYQLRDSKSSDKSVCLFTDFDSQTNVSQSKDSDVYITDKCVLDMRSMDFKSNSAVAWSNKSDFACANAFNNSIIPEDTFFPSPESSCDVKLVEKSFETDTNLNFQNLSVIGFRILLLKVAGFNLLMTLRLWSSRAKRSGSGVKQTLNFDLLKLAGDVESNPGPSRGHMTEYKPTVRLATRDDVPRAVRTLAAAFADYPATRHTVDPDRHIERVTELQELFLTRVGLDIGKVWVADDGAAVAVWTTPESVEAGAVFAEIGPRMAELSGSRLAAQQQMEGLLAPHRPKEPAWFLATVGVSPDHQGKGLGSAVVLPGVEAAERAGVPAFLETSAPRNLPFYERLGFTVTADVEVPEGPRTWCMTRKPGA

SEQ ID NO: 22927 - protein, 994 aa, Artificial Sequence
  Synthetic Polypeptide
MALPVTALLLPLALLLHAARPDIQMTQSPSSLSASVGDRVTITCKASDHINNWLAWYQQKPGQAPKLLIYGATTLETGVPSRFSGSGSGTDYTLTISSLQPEDFATYYCQQSWNTPWTFGQGTKLEIKRLEDLKNVFPPEVAVFEPSEAEISHTQKATLVCLATGFYPDHVELSWWVNGKEVHSGVCTDPQPLKEQPALNDSRYCLSSRLRVSATFWQNPRNHFRCQVQFYGLSENDEWTQDRAKPVTQIVSAEAWGRADCGFTSESYQQGVLSATILYEILLGKATLYAVLVSALVLMAMVKRKDSRGRAKRSGSGATNFSLLKQAGDVEENPGPTSATMDWIWRILFLVGAATGAHSGPEVQLVESGGGLVQAGGSLRLSCAASGRTFTMGWFRQAPGKEREFVAAISLSPTLAYYADSVKGRFTISRDNAKNTVVLQMNSLKPEDTALYYCAADRKSVMSIRPDYWGQGTQVTVSSGSGGGGSGGGGSGGGGSFEQVQLQQPGAELVKPGASVKMSCKASGYAFSSYWINWMKQKPGQGLEWIGQIYPGDGDTNYNGKFKGRATLTADTSSSTAYMQLSSLTSEDSAVYFCARSITTVVGCAMDYWGQGTSVTVSSTRIQNPDPAVYQLRDSKSSDKSVCLFTDFDSQTNVSQSKDSDVYITDKCVLDMRSMDFKSNSAVAWSNKSDFACANAFNNSIIPEDTFFPSPESSCDVKLVEKSFETDTNLNFQNLSVIGFRILLLKVAGFNLLMTLRLWSSRAKRSGSGVKQTLNFDLLKLAGDVESNPGPSRGHMTEYKPTVRLATRDDVPRAVRTLAAAFADYPATRHTVDPDRHIERVTELQELFLTRVGLDIGKVWVADDGAAVAVWTTPESVEAGAVFAEIGPRMAELSGSRLAAQQQMEGLLAPHRPKEPAWFLATVGVSPDHQGKGLGSAVVLPGVEAAERAGVPAFLETSAPRNLPFYERLGFTVTADVEVPEGPRTWCMTRKPGA

SEQ ID NO: 22928 - protein, 992 aa, Artificial Sequence; identical to SEQ ID NO: 14779
  Synthetic Polypeptide

SEQ ID NO: 22929 - protein, 995 aa, Artificial Sequence; identical to SEQ ID NO: 22922
  Synthetic Polypeptide

SEQ ID NO: 22930 - protein, 994 aa, Artificial Sequence
  Synthetic Polypeptide
MALPVTALLLPLALLLHAARPQVQLVESGGGLVQPGGSLRLSCAASGFTFTNHAMSWVRQAPGKGLELVSSISGNGRTTYYADSVKGRFTISRDISKNTLDLQMNSLRAEDTAVYYCAKDGGETLVDSRGQGTLVTVSSLEDLKNVFPPEVAVFEPSKAEIAHTQKATLVCLATGFYPDHVELSWWVNGKEVHSGVCTDPQPLKEQPALNDSRYCLSSRLRVSATFWQNPRNHFRCQVQFYGLSENDEWTQDRAKPVTQIVSAEAWGRADCGITSASYHQGVLSATILYEILLGKATLYAVLVSALVLMAMVKRKDSRGRAKRSGSGATNFSLLKQAGDVEENPGPTSTMALPVTALLLPLALLLHAARPQVQLVESGGGLVQPGGSLRLSCAASGFTFTNHAMSWVRQAPGKGLELVSSISGNGRTTYYADSVKGRFTISRDISKNTLDLQMNSLRAEDTAVYYCAKDGGETLVDSRGQGTLVTVSSLESGGGGSFEQVQLQQPGAELVKPGASVKMSCKASGYAFSSYWINWMKQKPGQGLEWIGQIYPGDGDTNYNGKFKGRATLTADTSSSTAYMQLSSLTSEDSAVYFCARSITTVVGCAMDYWGQGTSVTVSSTRIQNPDPAVYQLRDSKSSDKSVCLFTDFDSQTNVSQSKDSDVYITDKCVLDMRSMDFKSNSAVAWSNKSDFACANAFNNSIIPEDTFFPSSDVPCDVKLVEKSFETDTNLNFQNLSVIGFRILLLKVAGFNLLMTLRLWSSRAKRSGSGVKQTLNFDLLKLAGDVESNPGPSRGHMTEYKPTVRLATRDDVPRAVRTLAAAFADYPATRHTVDPDRHIERVTELQELFLTRVGLDIGKVWVADDGAAVAVWTTPESVEAGAVFAEIGPRMAELSGSRLAAQQQMEGLLAPHRPKEPAWFLATVGVSPDHQGKGLGSAVVLPGVEAAERAGVPAFLETSAPRNLPFYERLGFTVTADVEVPEGPRTWCMTRKPGA

SEQ ID NO: 22931 - protein, 995 aa, Artificial Sequence
  Synthetic Polypeptide
MALPVTALLLPLALLLHAARPQVQLVESGGGLVQPGGSLRLSCAASGFTFTNHAMSWVRQAPGKGLELVSSISGNGRTTYYADSVKGRFTISRDISKNTLDLQMNSLRAEDTAVYYCAKDGGETLVDSRGQGTLVTVSSLEIQNPDPAVYQLRDSKSSDKSVCLFTDFDSQTNVSQSKDSDVYITDKCVLDMRSMDFKSNSAVAWSNKSDFACANAFNNSIIPEDTFFPSSDVPCDVKLVEKSFETDTNLNFQNLSVIGFRILLLKVAGFNLLMTLRLWSSRAKRSGSGVKQTLNFDLLKLAGDVESNPGPTSTMALPVTALLLPLALLLHAARPQVQLVESGGGLVQPGGSLRLSCAASGFTFTNHAMSWVRQAPGKGLELVSSISGNGRTTYYADSVKGRFTISRDISKNTLDLQMNSLRAEDTAVYYCAKDGGETLVDSRGQGTLVTVSSLESGGGGSFEQVQLQQPGAELVKPGASVKMSCKASGYAFSSYWINWMKQKPGQGLEWIGQIYPGDGDTNYNGKFKGRATLTADTSSSTAYMQLSSLTSEDSAVYFCARSITTVVGCAMDYWGQGTSVTVSSTREDLKNVFPPEVAVFEPSKAEIAHTQKATLVCLATGFYPDHVELSWWVNGKEVHSGVCTDPQPLKEQPALNDSRYCLSSRLRVSATFWQNPRNHFRCQVQFYGLSENDEWTQDRAKPVTQIVSAEAWGRADCGITSASYHQGVLSATILYEILLGKATLYAVLVSALVLMAMVKRKDSRGRAKRSGSGATNFSLLKQAGDVEENPGPSRGHMTEYKPTVRLATRDDVPRAVRTLAAAFADYPATRHTVDPDRHIERVTELQELFLTRVGLDIGKVWVADDGAAVAVWTTPESVEAGAVFAEIGPRMAELSGSRLAAQQQMEGLLAPHRPKEPAWFLATVGVSPDHQGKGLGSAVVLPGVEAAERAGVPAFLETSAPRNLPFYERLGFTVTADVEVPEGPRTWCMTRKPGA

SEQ ID NO: 22932 - protein, 995 aa, Artificial Sequence
  Synthetic Polypeptide
MALPVTALLLPLALLLHAARPQLQLQESGPGLVKPSETLSLTCTVSGDSISSGDYYWGWIRQPPGKGLEWIGHIYYSGVTYYNPSLKSRVTISVDTSRNQFSLKLSSVTAADTAVYYCTREDSSNWRSRGQGTLVTVSSLEIQNPDPAVYQLRDSKSSDKSVCLFTDFDSQTNVSQSKDSDVYITDKCVLDMRSMDFKSNSAVAWSNKSDFACANAFNNSIIPEDTFFPSSDVPCDVKLVEKSFETDTNLNFQNLSVIGFRILLLKVAGFNLLMTLRLWSSRAKRSGSGVKQTLNFDLLKLAGDVESNPGPTSTMALPVTALLLPLALLLHAARPQLQLQESGPGLVKPSETLSLTCTVSGDSISSGDYYWGWIRQPPGKGLEWIGHIYYSGVTYYNPSLKSRVTISVDTSRNQFSLKLSSVTAADTAVYYCTREDSSNWRSRGQGTLVTVSSLESGGGGSFEQVQLQQPGAELVKPGASVKMSCKASGYAFSSYWINWMKQKPGQGLEWIGQIYPGDGDTNYNGKFKGRATLTADTSSSTAYMQLSSLTSEDSAVYFCARSITTVVGCAMDYWGQGTSVTVSSTREDLKNVFPPEVAVFEPSKAEIAHTQKATLVCLATGFYPDHVELSWWVNGKEVHSGVCTDPQPLKEQPALNDSRYCLSSRLRVSATFWQNPRNHFRCQVQFYGLSENDEWTQDRAKPVTQIVSAEAWGRADCGITSASYHQGVLSATILYEILLGKATLYAVLVSALVLMAMVKRKDSRGRAKRSGSGATNFSLLKQAGDVEENPGPSRGHMTEYKPTVRLATRDDVPRAVRTLAAAFADYPATRHTVDPDRHIERVTELQELFLTRVGLDIGKVWVADDGAAVAVWTTPESVEAGAVFAEIGPRMAELSGSRLAAQQQMEGLLAPHRPKEPAWFLATVGVSPDHQGKGLGSAVVLPGVEAAERAGVPAFLETSAPRNLPFYERLGFTVTADVEVPEGPRTWCMTRKPGA

SEQ ID NO: 22933 - protein, 980 aa, Artificial Sequence
  Synthetic Polypeptide
MALPVTALLLPLALLLHAARPEVQLVESGGGLVQPGGSLRLSCTFSGGTFSSYTMGWFRQAPGKEREFVAEVRWGGVTTYSNSLKDRFSISEDSVKNAVYLQMNSLKPEDTAVYYCAAVRQMYMTVVPDYWGQGTLVTVSSSGGGGSDIQMTQSPSSLSASVGDRVTITCKASDHINNWLAWYQQKPGKAPKLLIYGATTLETGVPSRFSGSGSGTDFTLTISSLQPEDFATYYCQQSWNTPWTFGQGTKVEIKRLEDLKNVFPPEVAVFEPSEAEISHTQKATLVCLATGFYPDHVELSWWVNGKEVHSGVCTDPQPLKEQPALNDSRYCLSSRLRVSATFWQNPRNHFRCQVQFYGLSENDEWTQDRAKPVTQIVSAEAWGRADCGFTSESYQQGVLSATILYEILLGKATLYAVLVSALVLMAMVKRKDSRGRAKRSGSGATNFSLLKQAGDVEENPGPTSMDWIWRILFLVGAATGAHSFEVQLVESGGGLVQPGGSLRLSCAASGYAFSSYWVNWVRQAPGKGLEWVAQIYPGDGDTNYNGKFKGRFTISRDNSKNTLYLQMNSLRAEDTAVYYCARSITTVVGCAMDYWGQGTLVTVSSTRIQNPDPAVYQLRDSKSSDKSVCLFTDFDSQTNVSQSKDSDVYITDKCVLDMRSMDFKSNSAVAWSNKSDFACANAFNNSIIPEDTFFPSPESSCDVKLVEKSFETDTNLNFQNLSVIGFRILLLKVAGFNLLMTLRLWSSRAKRSGSGVKQTLNFDLLKLAGDVESNPGPSRGHMTEYKPTVRLATRDDVPRAVRTLAAAFADYPATRHTVDPDRHIERVTELQELFLTRVGLDIGKVWVADDGAAVAVWTTPESVEAGAVFAEIGPRMAELSGSRLAAQQQMEGLLAPHRPKEPAWFLATVGVSPDHQGKGLGSAVVLPGVEAAERAGVPAFLETSAPRNLPFYERLGFTVTADVEVPEGPRTWCMTRKPGA

SEQ ID NO: 22934 - protein, 995 aa, Artificial Sequence
  Synthetic Polypeptide
MALPVTALLLPLALLLHAARPDIQMTQSPSSLSASVGDRVTITCKASDHINNWLAWYQQKPGQAPKLLIYGATTLETGVPSRFSGSGSGTDYTLTISSLQPEDFATYYCQQSWNTPWTFGQGTKLEIKRLEADVSPKPTIFLPSIAETKLQKAGTYLCLLEKFFPDVIKIHWQEKKSNTILGSQEGNTMKTNDTYMKFSWLTVPEKSLDKEHRCIVRHENNKNGVDQEIIFPPIKTDVITMDPKDNCSKDANDTLLLQLTNTSAYYMYLLLLLKSVVYFAIITCCLLRRTAFCCNGEKSRAKRSGSGATNFSLLKQAGDVEENPGPTSATMDWIWRILFLVGAATGAHSGPQVQLQESGGGLAQAGGSLRLSCAASGRTFSMGWFRQAPGKEREFVAAITYSGGSPYYASSVRGRFTISRDNAKNTVYLQMNSLKPEDTAVYYCAANPTYGSDWNAENWGQGTQVTVSSGSGGGGSGGGGSGGGGSFEQVQLQQPGAELVKPGASVKMSCKASGYAFSSYWINWMKQKPGQGLEWIGQIYPGDGDTNYNGKFKGRATLTADTSSSTAYMQLSSLTSEDSAVYFCARSITTVVGCAMDYWGQGTSVTVSSTRPHTKPSVFVMKNGTNVACLVKEFYPKDIRINLVSSKKITEFDPAIVISPSGKYNAVKLGKYEDSNSVTCSVQHDNKTVHSTDFEVKTDSTDHVKPKETENTKQPSKSCHKPKAIVHTEKVNMMSLTVLGLRMLFAKTVAVNFLLTAKLFFLRAKRSGSGVKQTLNFDLLKLAGDVESNPGPSRGHMTEYKPTVRLATRDDVPRAVRTLAAAFADYPATRHTVDPDRHIERVTELQELFLTRVGLDIGKVWVADDGAAVAVWTTPESVEAGAVFAEIGPRMAELSGSRLAAQQQMEGLLAPHRPKEPAWFLATVGVSPDHQGKGLGSAVVLPGVEAAERAGVPAFLETSAPRNLPFYERLGFTVTADVEVPEGPRTWCMTRKPGA

SEQ ID NO: 22935 - protein, 998 aa, Artificial Sequence
  Synthetic Polypeptide
MALPVTALLLPLALLLHAARPDIQMTQSPSSLSASVGDRVTITCKASDHINNWLAWYQQKPGQAPKLLIYGATTLETGVPSRFSGSGSGTDYTLTISSLQPEDFATYYCQQSWNTPWTFGQGTKLEIKRLEGQPKANPTVTLFPPSSEELQANKATLVCLISDFYPGAVTVAWKADGSPVKAGVETTKPSKQSNNKYAASSYLSLTPEQWKSHRSYSCQVTHEGSTVEKTVAPTECSGRADCGFTSESYQQGVLSATILYEILLGKATLYAVLVSALVLMAMVKRKDSRGRAKRSGSGATNFSLLKQAGDVEENPGPTSATMDWIWRILFLVGAATGAHSGPQVQLQESGGGLAQAGGSLRLSCAASGRTFSMGWFRQAPGKEREFVAAITYSGGSPYYASSVRGRFTISRDNAKNTVYLQMNSLKPEDTAVYYCAANPTYGSDWNAENWGQGTQVTVSSGSGGGGSGGGGSGGGGSFEQVQLQQPGAELVKPGASVKMSCKASGYAFSSYWINWMKQKPGQGLEWIGQIYPGDGDTNYNGKFKGRATLTADTSSSTAYMQLSSLTSEDSAVYFCARSITTVVGCAMDYWGQGTSVTVSSTRASTKGPSVFPLAPSSKSTSGGTAALGCLVKDYFPEPVTVSWNSGALTSGVHTFPAVLQSSGLYSLSSVVTVPSSSLGTQTYICNVNHKPSNTKVDKRVEPKSCIPEDTFFPSPESSCDVKLVEKSFETDTNLNFQNLSVIGFRILLLKVAGFNLLMTLRLWSSRAKRSGSGVKQTLNFDLLKLAGDVESNPGPSRGHMTEYKPTVRLATRDDVPRAVRTLAAAFADYPATRHTVDPDRHIERVTELQELFLTRVGLDIGKVWVADDGAAVAVWTTPESVEAGAVFAEIGPRMAELSGSRLAAQQQMEGLLAPHRPKEPAWFLATVGVSPDHQGKGLGSAVVLPGVEAAERAGVPAFLETSAPRNLPFYERLGFTVTADVEVPEGPRTWCMTRKPGA

SEQ ID NO: 22936 - protein, 1020 aa, Artificial Sequence
  Synthetic Polypeptide
MALPVTALLLPLALLLHAARPDIQMTQSPSSLSASVGDRVTITCKASDHINNWLAWYQQKPGQAPKLLIYGATTLETGVPSRFSGSGSGTDYTLTISSLQPEDFATYYCQQSWNTPWTFGQGTKLEIKRLEGQPKANPTVTLFPPSSEELQANKATLVCLISDFYPGAVTVAWKADGSPVKAGVETTKPSKQSNNKYAASSYLSLTPEQWKSHRSYSCQVTHEGSTVEKTVAPTECSPIKTDVITMDPKDNCSKDANDTLLLQLTNTSAYYMYLLLLLKSVVYFAIITCCLLRRTAFCCNGEKSRAKRSGSGATNFSLLKQAGDVEENPGPTSATMDWIWRILFLVGAATGAHSGPQVQLQESGGGLAQAGGSLRLSCAASGRTFSMGWFRQAPGKEREFVAAITYSGGSPYYASSVRGRFTISRDNAKNTVYLQMNSLKPEDTAVYYCAANPTYGSDWNAENWGQGTQVTVSSGSGGGGSGGGGSGGGGSFEQVQLQQPGAELVKPGASVKMSCKASGYAFSSYWINWMKQKPGQGLEWIGQIYPGDGDTNYNGKFKGRATLTADTSSSTAYMQLSSLTSEDSAVYFCARSITTVVGCAMDYWGQGTSVTVSSTRASTKGPSVFPLAPSSKSTSGGTAALGCLVKDYFPEPVTVSWNSGALTSGVHTFPAVLQSSGLYSLSSVVTVPSSSLGTQTYICNVNHKPSNTKVDKRVEPKSCEVKTDSTDHVKPKETENTKQPSKSCHKPKAIVHTEKVNMMSLTVLGLRMLFAKTVAVNFLLTAKLFFLRAKRSGSGVKQTLNFDLLKLAGDVESNPGPSRGHMTEYKPTVRLATRDDVPRAVRTLAAAFADYPATRHTVDPDRHIERVTELQELFLTRVGLDIGKVWVADDGAAVAVWTTPESVEAGAVFAEIGPRMAELSGSRLAAQQQMEGLLAPHRPKEPAWFLATVGVSPDHQGKGLGSAVVLPGVEAAERAGVPAFLETSAPRNLPFYERLGFTVTADVEVPEGPRTWCMTRKPGA

SEQ ID NO: 22937 - protein, 888 aa, Artificial Sequence; identical to SEQ ID NO: 17511
  Synthetic Polypeptide

SEQ ID NO: 22938 - protein, 1134 aa, Artificial Sequence
  Synthetic Polypeptide
MALPVTALLLPLALLLHAARPACEVQLLESGGGLIQPGGSLRLSCAASGFTFSSHAMTWVRQAPGKGLEWVSAISGSGDYTHYADSVKGRFTISRDNSKNTVYLQMNSLRAEDSAVYYCAKDEDGGSLLGHRGQGTLVTVSSGTGGGGSGGGGSGGGGSEFDIQMTQSPSSLSASVGDRVTITCKASDHINNWLAWYQQKPGQAPKLLIYGATTLETGVPSRFSGSGSGTDYTLTISSLQPEDFATYYCQQSWNTPWTFGQGTKLEIKRLEDLKNVFPPEVAVFEPSKAEIAHTQKATLVCLATGFYPDHVELSWWVNGKEVHSGVCTDPQPLKEQPALNDSRYCLSSRLRVSATFWQNPRNHFRCQVQFYGLSENDEWTQDRAKPVTQIVSAEAWGRADCGITSASYHQGVLSATILYEILLGKATLYAVLVSALVLMAMVKRKDSRGRAKRSGSGATNFSLLKQAGDVEENPGPTSATMDWIWRILFLVGAATGAHSGPQVQLQESGGGLAQAGGSLRLSCAASGRTFSMGWFRQAPGKEREFVAAITYSGGSPYYASSVRGRFTISRDNAKNTVYLQMNSLKPEDTAVYYCAANPTYGSDWNAENWGQGTQVTVSSGSGGGGSGGGGSGGGGSFEQVQLQQPGAELVKPGASVKMSCKASGYAFSSYWINWMKQKPGQGLEWIGQIYPGDGDTNYNGKFKGRATLTADTSSSTAYMQLSSLTSEDSAVYFCARSITTVVGCAMDYWGQGTSVTVSSTRIQNPDPAVYQLRDSKSSDKSVCLFTDFDSQTNVSQSKDSDVYITDKCVLDMRSMDFKSNSAVAWSNKSDFACANAFNNSIIPEDTFFPSSDVPCDVKLVEKSFETDTNLNFQNLSVIGFRILLLKVAGFNLLMTLRLWSSRAKRSGSGVKQTLNFDLLKLAGDVESNPGPSRGHMTEYKPTVRLATRDDVPRAVRTLAAAFADYPATRHTVDPDRHIERVTELQELFLTRVGLDIGKVWVADDGAAVAVWTTPESVEAGAVFAEIGPRMAELSGSRLAAQQQMEGLLAPHRPKEPAWFLATVGVSPDHQGKGLGSAVVLPGVEAAERAGVPAFLETSAPRNLPFYERLGFTVTADVEVPEGPRTWCMTRKPGA

SEQ ID NO: 22939 - protein, 1260 aa, Artificial Sequence
  Synthetic Polypeptide
MALPVTALLLPLALLLHAARPEVQLVESGGGLVQAGGSLRLSCAASGRTFSMGWFRQAPGKEREFVAAITYSGGSPYYADSVKGRFTISRDNAKNTVYLQMNSLKPEDTAVYYCAANPTYGSDWNAENWGQGTQVTVSSGGGGSGGGGSQLQLQESGPGLVKPSETLSLTCTVSGGSISSGDYYWGWIRQPPGKGLEWIGSISYSGSTYYNPSLKSRVTISVDTSRNQFSLKLSSVTAADTAVYYCTREDSSNWRSRGQGTLVTVSSGTGGGGSGGGGSGGGGSEFDIQMTQSPSSLSASVGDRVTITCKASDHINNWLAWYQQKPGQAPKLLIYGATTLETGVPSRFSGSGSGTDYTLTISSLQPEDFATYYCQQSWNTPWTFGQGTKLEIKRLEIQNPDPAVYQLRDSKSSDKSVCLFTDFDSQTNVSQSKDSDVYITDKCVLDMRSMDFKSNSAVAWSNKSDFACANAFNNSIIPEDTFFPSSDVPCDVKLVEKSFETDTNLNFQNLSVIGFRILLLKVAGFNLLMTLRLWSSRAKRSGSGVKQTLNFDLLKLAGDVESNPGPTSATMDWIWRILFLVGAATGAHSGPQVQLQESGGGLAQAGGSLRLSCAASGRTFSMGWFRQAPGKEREFVAAITYSGGSPYYASSVRGRFTISRDNAKNTVYLQMNSLKPEDTAVYYCAANPTYGSDWNAENWGQGTQVTVSSGSGGGGSGGGGSGGGGSFEQVQLQQPGAELVKPGASVKMSCKASGYAFSSYWINWMKQKPGQGLEWIGQIYPGDGDTNYNGKFKGRATLTADTSSSTAYMQLSSLTSEDSAVYFCARSITTVVGCAMDYWGQGTSVTVSSTREDLKNVFPPEVAVFEPSKAEIAHTQKATLVCLATGFYPDHVELSWWVNGKEVHSGVCTDPQPLKEQPALNDSRYCLSSRLRVSATFWQNPRNHFRCQVQFYGLSENDEWTQDRAKPVTQIVSAEAWGRADCGITSASYHQGVLSATILYEILLGKATLYAVLVSALVLMAMVKRKDSRGRAKRSGSGATNFSLLKQAGDVEENPGPSRGHMTEYKPTVRLATRDDVPRAVRTLAAAFADYPATRHTVDPDRHIERVTELQELFLTRVGLDIGKVWVADDGAAVAVWTTPESVEAGAVFAEIGPRMAELSGSRLAAQQQMEGLLAPHRPKEPAWFLATVGVSPDHQGKGLGSAVVLPGVEAAERAGVPAFLETSAPRNLPFYERLGFTVTADVEVPEGPRTWCMTRKPGA

SEQ ID NO: 22940 - protein, 1131 aa, Artificial Sequence
  Synthetic Polypeptide
MALPVTALLLPLALLLHAARPEVQLVESGGGLVQAGGSLRLSCAASGRTFSMGWFRQAPGKEREFVAAITYSGGSPYYADSVKGRFTISRDNAKNTVYLQMNSLKPEDTAVYYCAANPTYGSDWNAENWGQGTQVTVSSGTGGGGSGGGGSGGGGSEFDIQMTQSPSSLSASVGDRVTITCKASDHINNWLAWYQQKPGQAPKLLIYGATTLETGVPSRFSGSGSGTDYTLTISSLQPEDFATYYCQQSWNTPWTFGQGTKLEIKRLEDLKNVFPPEVAVFEPSKAEIAHTQKATLVCLATGFYPDHVELSWWVNGKEVHSGVCTDPQPLKEQPALNDSRYCLSSRLRVSATFWQNPRNHFRCQVQFYGLSENDEWTQDRAKPVTQIVSAEAWGRADCGITSASYHQGVLSATILYEILLGKATLYAVLVSALVLMAMVKRKDSRGRAKRSGSGATNFSLLKQAGDVEENPGPTSATMDWIWRILFLVGAATGAHSGPQVQLQESGGGLAQAGGSLRLSCAASGRTFSMGWFRQAPGKEREFVAAITYSGGSPYYASSVRGRFTISRDNAKNTVYLQMNSLKPEDTAVYYCAANPTYGSDWNAENWGQGTQVTVSSGSGGGGSGGGGSGGGGSFEQVQLQQPGAELVKPGASVKMSCKASGYAFSSYWINWMKQKPGQGLEWIGQIYPGDGDTNYNGKFKGRATLTADTSSSTAYMQLSSLTSEDSAVYFCARSITTVVGCAMDYWGQGTSVTVSSTRIQNPDPAVYQLRDSKSSDKSVCLFTDFDSQTNVSQSKDSDVYITDKCVLDMRSMDFKSNSAVAWSNKSDFACANAFNNSIIPEDTFFPSSDVPCDVKLVEKSFETDTNLNFQNLSVIGFRILLLKVAGFNLLMTLRLWSSRAKRSGSGVKQTLNFDLLKLAGDVESNPGPSRGHMTEYKPTVRLATRDDVPRAVRTLAAAFADYPATRHTVDPDRHIERVTELQELFLTRVGLDIGKVWVADDGAAVAVWTTPESVEAGAVFAEIGPRMAELSGSRLAAQQQMEGLLAPHRPKEPAWFLATVGVSPDHQGKGLGSAVVLPGVEAAERAGVPAFLETSAPRNLPFYERLGFTVTADVEVPEGPRTWCMTRKPGA

SEQ ID NO: 22941 - protein, 1129 aa, Artificial Sequence
  Synthetic Polypeptide
MALPVTALLLPLALLLHAARPEVQLVESGGGLVQPGGSLRLSCAASGFSFSDFWMSWVRQAPGKGLEWVATISQAGSEKDYVDSVKGRFTISRDNAKKSLYLQMNSLRAEDTAVYYCASGVYSFDYRGQGTLVTVSSGTGGGGSGGGGSGGGGSEFDIQMTQSPSSLSASVGDRVTITCKASDHINNWLAWYQQKPGQAPKLLIYGATTLETGVPSRFSGSGSGTDYTLTISSLQPEDFATYYCQQSWNTPWTFGQGTKLEIKRLEDLKNVFPPEVAVFEPSKAEIAHTQKATLVCLATGFYPDHVELSWWVNGKEVHSGVCTDPQPLKEQPALNDSRYCLSSRLRVSATFWQNPRNHFRCQVQFYGLSENDEWTQDRAKPVTQIVSAEAWGRADCGITSASYHQGVLSATILYEILLGKATLYAVLVSALVLMAMVKRKDSRGRAKRSGSGATNFSLLKQAGDVEENPGPTSATMDWIWRILFLVGAATGAHSGPQVQLQESGGGLAQAGGSLRLSCAASGRTFSMGWFRQAPGKEREFVAAITYSGGSPYYASSVRGRFTISRDNAKNTVYLQMNSLKPEDTAVYYCAANPTYGSDWNAENWGQGTQVTVSSGSGGGGSGGGGSGGGGSFEQVQLQQPGAELVKPGASVKMSCKASGYAFSSYWINWMKQKPGQGLEWIGQIYPGDGDTNYNGKFKGRATLTADTSSSTAYMQLSSLTSEDSAVYFCARSITTVVGCAMDYWGQGTSVTVSSTRIQNPDPAVYQLRDSKSSDKSVCLFTDFDSQTNVSQSKDSDVYITDKCVLDMRSMDFKSNSAVAWSNKSDFACANAFNNSIIPEDTFFPSSDVPCDVKLVEKSFETDTNLNFQNLSVIGFRILLLKVAGFNLLMTLRLWSSRAKRSGSGVKQTLNFDLLKLAGDVESNPGPSRGHMTEYKPTVRLATRDDVPRAVRTLAAAFADYPATRHTVDPDRHIERVTELQELFLTRVGLDIGKVWVADDGAAVAVWTTPESVEAGAVFAEIGPRMAELSGSRLAAQQQMEGLLAPHRPKEPAWFLATVGVSPDHQGKGLGSAVVLPGVEAAERAGVPAFLETSAPRNLPFYERLGFTVTADVEVPEGPRTWCMTRKPGA

SEQ ID NO: 22942 - protein, 1104 aa, Artificial Sequence
  Synthetic Polypeptide
MALPVTALLLPLALLLHAARPMLPAPKNLVVSRITEDSARLSWTAPDAAFDSFPIRYIETLIWGEAIWLDVPGSERSYDLTGLKPGTEYAVVITGVKGGRFSSPLVASFTTGTGGGGSGGGGSGGGGSEFDIQMTQSPSSLSASVGDRVTITCKASDHINNWLAWYQQKPGQAPKLLIYGATTLETGVPSRFSGSGSGTDYTLTISSLQPEDFATYYCQQSWNTPWTFGQGTKLEIKRLEIQNPDPAVYQLRDSKSSDKSVCLFTDFDSQTNVSQSKDSDVYITDKCVLDMRSMDFKSNSAVAWSNKSDFACANAFNNSIIPEDTFFPSSDVPCDVKLVEKSFETDTNLNFQNLSVIGFRILLLKVAGFNLLMTLRLWSSRAKRSGSGVKQTLNFDLLKLAGDVESNPGPTSATMDWIWRILFLVGAATGAHSGPQVQLQESGGGLAQAGGSLRLSCAASGRTFSMGWFRQAPGKEREFVAAITYSGGSPYYASSVRGRFTISRDNAKNTVYLQMNSLKPEDTAVYYCAANPTYGSDWNAENWGQGTQVTVSSGSGGGGSGGGGSGGGGSFEQVQLQQPGAELVKPGASVKMSCKASGYAFSSYWINWMKQKPGQGLEWIGQIYPGDGDTNYNGKFKGRATLTADTSSSTAYMQLSSLTSEDSAVYFCARSITTVVGCAMDYWGQGTSVTVSSTREDLKNVFPPEVAVFEPSKAEIAHTQKATLVCLATGFYPDHVELSWWVNGKEVHSGVCTDPQPLKEQPALNDSRYCLSSRLRVSATFWQNPRNHFRCQVQFYGLSENDEWTQDRAKPVTQIVSAEAWGRADCGITSASYHQGVLSATILYEILLGKATLYAVLVSALVLMAMVKRKDSRGRAKRSGSGATNFSLLKQAGDVEENPGPSRGHMTEYKPTVRLATRDDVPRAVRTLAAAFADYPATRHTVDPDRHIERVTELQELFLTRVGLDIGKVWVADDGAAVAVWTTPESVEAGAVFAEIGPRMAELSGSRLAAQQQMEGLLAPHRPKEPAWFLATVGVSPDHQGKGLGSAVVLPGVEAAERAGVPAFLETSAPRNLPFYERLGFTVTADVEVPEGPRTWCMTRKPGA

SEQ ID NO: 22943 - protein, 1138 aa, Artificial Sequence
  Synthetic Polypeptide
MALPVTALLLPLALLLHAARPQVQLVESGGGLVQPGGSLRLSCAASGFTFTNHAMSWVRQAPGKGLELVSSISGNGRTTYYADSVKGRFTISRDISKNTLDLQMNSLRAEDTAVYYCAKDGGETLVDSRGQGTLVTVSSLEGGGGSGGGGSIEGGGGSGGGGSKVQLLESGGGLVQPGGSLRLSCAASGFIFSSYAMSWVRQAPGKGQEWVSGVSGTGVNTYYADSVKGRFTISRDNSKNTLYLQMNSLRAEDTAVYYCASGKGWDSGSWYEDYRGQGTLVTVSSGTGGGGSGGGGSGGGGSEFDIQMTQSPSSLSASVGDRVTITCKASDHINNWLAWYQQKPGQAPKLLIYGATTLETGVPSRFSGSGSGTDYTLTISSLQPEDFATYYCQQSWNTPWTFGQGTKLEIKRLEDLKNVFPPEVAVFEPSEAEISHTQKATLVCLATGFYPDHVELSWWVNGKEVHSGVCTDPQPLKEQPALNDSRYCLSSRLRVSATFWQNPRNHFRCQVQFYGLSENDEWTQDRAKPVTQIVSAEAWGRADCGFTSESYQQGVLSATILYEILLGKATLYAVLVSALVLMAMVKRKDSRGRAKRSGSGATNFSLLKQAGDVEENPGPTSMDWIWRILFLVGAATGAHSFEQVQLQQPGAELVKPGASVKMSCKASGYAFSSYWINWMKQKPGQGLEWIGQIYPGDGDTNYNGKFKGRATLTADTSSSTAYMQLSSLTSEDSAVYFCARSITTVVGCAMDYWGQGTSVTVSSTRIQNPDPAVYQLRDSKSSDKSVCLFTDFDSQTNVSQSKDSDVYITDKCVLDMRSMDFKSNSAVAWSNKSDFACANAFNNSIIPEDTFFPSPESSCDVKLVEKSFETDTNLNFQNLSVIGFRILLLKVAGFNLLMTLRLWSSRAKRSGSGVKQTLNFDLLKLAGDVESNPGPSRAHMTEYKPTVRLATRDDVPRAVRTLAAAFADYPATRHTVDPDRHIERVTELQELFLTRVGLDIGKVWVADDGAAVAVWTTPESVEAGAVFAEIGPRMAELSGSRLAAQQQMEGLLAPHRPKEPAWFLATVGVSPDHQGKGLGSAVVLPGVEAAERAGVPAFLETSAPRNLPFYERLGFTVTADVEVPEGPRTWCMTRKPGA

SEQ ID NO: 22944 - protein, 1131 aa, Artificial Sequence
  Synthetic Polypeptide
MALPVTALLLPLALLLHAARPEVQVLESGGGLVQPGGSLRLSCAASGFTFSNFAMSWVRQAPGKGLEWVSTISGSAGTTDYADSVKGRFTISRDNSKKTLYLQMNSLRVEDTAVYYCADGRGPFFDYRGQGTLVTVSSGTGGGGSGGGGSGGGGSEFDIQMTQSPSSLSASVGDRVTITCKASDHINNWLAWYQQKPGQAPKLLIYGATTLETGVPSRFSGSGSGTDYTLTISSLQPEDFATYYCQQSWNTPWTFGQGTKLEIKRLEIQNPDPAVYQLRDSKSSDKSVCLFTDFDSQTNVSQSKDSDVYITDKCVLDMRSMDFKSNSAVAWSNKSDFACANAFNNSIIPEDTFFPSSDVPCDVKLVEKSFETDTNLNFQNLSVIGFRILLLKVAGFNLLMTLRLWSSRAKRSGSGVKQTLNFDLLKLAGDVESNPGPTSATMDWIWRILFLVGAATGAHSGPQVQLQESGGGLAQAGGSLRLSCAASGRTFSMGWFRQAPGKEREFVAAITYSGGSPYYASSVRGRFTISRDNAKNTVYLQMNSLKPEDTAVYYCAANPTYGSDWNAENWGQGTQVTVSSGSGGGGSGGGGSGGGGSFEQVQLQQPGAELVKPGASVKMSCKASGYAFSSYWINWMKQKPGQGLEWIGQIYPGDGDTNYNGKFKGRATLTADTSSSTAYMQLSSLTSEDSAVYFCARSITTVVGCAMDYWGQGTSVTVSSTREDLKNVFPPEVAVFEPSKAEIAHTQKATLVCLATGFYPDHVELSWWVNGKEVHSGVCTDPQPLKEQPALNDSRYCLSSRLRVSATFWQNPRNHFRCQVQFYGLSENDEWTQDRAKPVTQIVSAEAWGRADCGITSASYHQGVLSATILYEILLGKATLYAVLVSALVLMAMVKRKDSRGRAKRSGSGATNFSLLKQAGDVEENPGPSRGHMTEYKPTVRLATRDDVPRAVRTLAAAFADYPATRHTVDPDRHIERVTELQELFLTRVGLDIGKVWVADDGAAVAVWTTPESVEAGAVFAEIGPRMAELSGSRLAAQQQMEGLLAPHRPKEPAWFLATVGVSPDHQGKGLGSAVVLPGVEAAERAGVPAFLETSAPRNLPFYERLGFTVTADVEVPEGPRTWCMTRKPGA

SEQ ID NO: 22945 - protein, 1134 aa, Artificial Sequence; identical to SEQ ID NO: 22938
  Synthetic Polypeptide

SEQ ID NO: 22946 - protein, 1134 aa, Artificial Sequence; identical to SEQ ID NO: 22938
  Synthetic Polypeptide

SEQ ID NO: 22947 - protein, 1134 aa, Artificial Sequence
  Synthetic Polypeptide
MALPVTALLLPLALLLHAARPACEVQLLESGGGLIQPGGSLRLSCAASGFTFSSHAMTWVRQAPGKGLEWVSAISGSGDYTHYADSVKGRFTISRDNSKNTVYLQMNSLRAEDSAVYYCAKDEDGGSLLGHRGQGTLVTVSSGTGGGGSGGGGSGGGGSEFDIQMTQSPSSLSASVGDRVTITCKASDHINNWLAWYQQKPGQAPKLLIYGATTLETGVPSRFSGSGSGTDYTLTISSLQPEDFATYYCQQSWNTPWTFGQGTKLEIKRLEDLKNVFPPEVAVFEPSKAEIAHTQKATLVCLATGFYPDHVELSWWVNGKEVHSGVCTDPQPLKEQPALNDSRYCLSSRLRVSATFWQNPRNHFRCQVQFYGLSENDEWTQDRAKPVTQIVSAEAWGRADCGITSASYHQGVLSATILYEILLGKATLYAVLVSALVLMAMVKRKDSRGRAKRSGSGATNFSLLKQAGDVEENPGPTSATMDWIWRILFLVGAATGAHSGPEVQLVESGGGLVQAGGSLRLSCAASGRTFSMGWFRQAPGKEREFVAAITYSGGSPYYADSVKGRFTISRDNAKNTVYLQMNSLKPEDTAVYYCAANPTYGSDWNAENWGQGTQVTVSSGSGGGGSGGGGSGGGGSFEQVQLQQPGAELVKPGASVKMSCKASGYAFSSYWINWMKQKPGQGLEWIGQIYPGDGDTNYNGKFKGRATLTADTSSSTAYMQLSSLTSEDSAVYFCARSITTVVGCAMDYWGQGTSVTVSSTRIQNPDPAVYQLRDSKSSDKSVCLFTDFDSQTNVSQSKDSDVYITDKCVLDMRSMDFKSNSAVAWSNKSDFACANAFNNSIIPEDTFFPSSDVPCDVKLVEKSFETDTNLNFQNLSVIGFRILLLKVAGFNLLMTLRLWSSRAKRSGSGVKQTLNFDLLKLAGDVESNPGPSRGHMTEYKPTVRLATRDDVPRAVRTLAAAFADYPATRHTVDPDRHIERVTELQELFLTRVGLDIGKVWVADDGAAVAVWTTPESVEAGAVFAEIGPRMAELSGSRLAAQQQMEGLLAPHRPKEPAWFLATVGVSPDHQGKGLGSAVVLPGVEAAERAGVPAFLETSAPRNLPFYERLGFTVTADVEVPEGPRTWCMTRKPGA

SEQ ID NO: 22948 - protein, 1129 aa, Artificial Sequence; identical to SEQ ID NO: 22941
  Synthetic Polypeptide

SEQ ID NO: 22949 - protein, 1132 aa, Artificial Sequence
  Synthetic Polypeptide
MALPVTALLLPLALLLHAARPACEVQVLESGGGLVQPGGSLRLSCAASGFTFSNFAMSWVRQAPGKGLEWVSTISGSAGTTDYADSVKGRFTISRDNSKKTLYLQMNSLRVEDTAVYYCADGRGPFFDYRGQGTLVTVSSGTGGGGSGGGGSGGGGSEFDIQMTQSPSSLSASVGDRVTITCKASDHINNWLAWYQQKPGQAPKLLIYGATTLETGVPSRFSGSGSGTDYTLTISSLQPEDFATYYCQQSWNTPWTFGQGTKLEIKRLEDLKNVFPPEVAVFEPSKAEIAHTQKATLVCLATGFYPDHVELSWWVNGKEVHSGVCTDPQPLKEQPALNDSRYCLSSRLRVSATFWQNPRNHFRCQVQFYGLSENDEWTQDRAKPVTQIVSAEAWGRADCGITSASYHQGVLSATILYEILLGKATLYAVLVSALVLMAMVKRKDSRGRAKRSGSGATNFSLLKQAGDVEENPGPTSATMDWIWRILFLVGAATGAHSGPQVQLQESGGGLAQAGGSLRLSCAASGRTFSMGWFRQAPGKEREFVAAITYSGGSPYYASSVRGRFTISRDNAKNTVYLQMNSLKPEDTAVYYCAANPTYGSDWNAENWGQGTQVTVSSGSGGGGSGGGGSGGGGSFEQVQLQQPGAELVKPGASVKMSCKASGYAFSSYWINWMKQKPGQGLEWIGQIYPGDGDTNYNGKFKGRATLTADTSSSTAYMQLSSLTSEDSAVYFCARSITTVVGCAMDYWGQGTSVTVSSTRIQNPDPAVYQLRDSKSSDKSVCLFTDFDSQTNVSQSKDSDVYITDKCVLDMRSMDFKSNSAVAWSNKSDFACANAFNNSIIPEDTFFPSSDVPCDVKLVEKSFETDTNLNFQNLSVIGFRILLLKVAGFNLLMTLRLWSSRAKRSGSGVKQTLNFDLLKLAGDVESNPGPSRGHMTEYKPTVRLATRDDVPRAVRTLAAAFADYPATRHTVDPDRHIERVTELQELFLTRVGLDIGKVWVADDGAAVAVWTTPESVEAGAVFAEIGPRMAELSGSRLAAQQQMEGLLAPHRPKEPAWFLATVGVSPDHQGKGLGSAVVLPGVEAAERAGVPAFLETSAPRNLPFYERLGFTVTADVEVPEGPRTWCMTRKPGA

SEQ ID NO: 22950 - protein, 1134 aa, Artificial Sequence
  Synthetic Polypeptide
MALPVTALLLPLALLLHAARPACEVQLLESGGGLIQPGGSLRLSCAASGFTFSSHAMTWVRQAPGKGLEWVSAISGSGDYTHYADSVKGRFTISRDNSKNTVYLQMNSLRAEDSAVYYCAKDEDGGSLLGHRGQGTLVTVSSGTGGGGSGGGGSGGGGSEFDIQMTQSPSSLSASVGDRVTITCKASDHINNWLAWYQQKPGQAPKLLIYGATTLETGVPSRFSGSGSGTDYTLTISSLQPEDFATYYCQQSWNTPWTFGQGTKLEIKRLEDLKNVFPPEVAVFEPSEAEISHTQKATLVCLATGFYPDHVELSWWVNGKEVHSGVCTDPQPLKEQPALNDSRYCLSSRLRVSATFWQNPRNHFRCQVQFYGLSENDEWTQDRAKPVTQIVSAEAWGRADCGFTSESYQQGVLSATILYEILLGKATLYAVLVSALVLMAMVKRKDSRGRAKRSGSGATNFSLLKQAGDVEENPGPTSATMDWIWRILFLVGAATGAHSGPEVQLVESGGGLVQAGGSLRLSCAASGRTFSMGWFRQAPGKEREFVAAITYSGGSPYYADSVKGRFTISRDNAKNTVYLQMNSLKPEDTAVYYCAANPTYGSDWNAENWGQGTQVTVSSGSGGGGSGGGGSGGGGSFEQVQLQQPGAELVKPGASVKMSCKASGYAFSSYWINWMKQKPGQGLEWIGQIYPGDGDTNYNGKFKGRATLTADTSSSTAYMQLSSLTSEDSAVYFCARSITTVVGCAMDYWGQGTSVTVSSTRIQNPDPAVYQLRDSKSSDKSVCLFTDFDSQTNVSQSKDSDVYITDKCVLDMRSMDFKSNSAVAWSNKSDFACANAFNNSIIPEDTFFPSPESSCDVKLVEKSFETDTNLNFQNLSVIGFRILLLKVAGFNLLMTLRLWSSRAKRSGSGVKQTLNFDLLKLAGDVESNPGPSRGHMTEYKPTVRLATRDDVPRAVRTLAAAFADYPATRHTVDPDRHIERVTELQELFLTRVGLDIGKVWVADDGAAVAVWTTPESVEAGAVFAEIGPRMAELSGSRLAAQQQMEGLLAPHRPKEPAWFLATVGVSPDHQGKGLGSAVVLPGVEAAERAGVPAFLETSAPRNLPFYERLGFTVTADVEVPEGPRTWCMTRKPGA

SEQ ID NO: 22951 - protein, 1131 aa, Artificial Sequence
  Synthetic Polypeptide
MALPVTALLLPLALLLHAARPEVQLVESGGGLVQAGGSLRLSCAASGRTFSMGWFRQAPGKEREFVAAITYSGGSPYYADSVKGRFTISRDNAKNTVYLQMNSLKPEDTAVYYCAANPTYGSDWNAENWGQGTQVTVSSGTGGGGSGGGGSGGGGSEFDIQMTQSPSSLSASVGDRVTITCKASDHINNWLAWYQQKPGQAPKLLIYGATTLETGVPSRFSGSGSGTDYTLTISSLQPEDFATYYCQQSWNTPWTFGQGTKLEIKRLEDLKNVFPPEVAVFEPSEAEISHTQKATLVCLATGFYPDHVELSWWVNGKEVHSGVCTDPQPLKEQPALNDSRYCLSSRLRVSATFWQNPRNHFRCQVQFYGLSENDEWTQDRAKPVTQIVSAEAWGRADCGFTSESYQQGVLSATILYEILLGKATLYAVLVSALVLMAMVKRKDSRGRAKRSGSGATNFSLLKQAGDVEENPGPTSATMDWIWRILFLVGAATGAHSGPQVQLQESGGGLAQAGGSLRLSCAASGRTFSMGWFRQAPGKEREFVAAITYSGGSPYYASSVRGRFTISRDNAKNTVYLQMNSLKPEDTAVYYCAANPTYGSDWNAENWGQGTQVTVSSGSGGGGSGGGGSGGGGSFEQVQLQQPGAELVKPGASVKMSCKASGYAFSSYWINWMKQKPGQGLEWIGQIYPGDGDTNYNGKFKGRATLTADTSSSTAYMQLSSLTSEDSAVYFCARSITTVVGCAMDYWGQGTSVTVSSTRIQNPDPAVYQLRDSKSSDKSVCLFTDFDSQTNVSQSKDSDVYITDKCVLDMRSMDFKSNSAVAWSNKSDFACANAFNNSIIPEDTFFPSPESSCDVKLVEKSFETDTNLNFQNLSVIGFRILLLKVAGFNLLMTLRLWSSRAKRSGSGVKQTLNFDLLKLAGDVESNPGPSRGHMTEYKPTVRLATRDDVPRAVRTLAAAFADYPATRHTVDPDRHIERVTELQELFLTRVGLDIGKVWVADDGAAVAVWTTPESVEAGAVFAEIGPRMAELSGSRLAAQQQMEGLLAPHRPKEPAWFLATVGVSPDHQGKGLGSAVVLPGVEAAERAGVPAFLETSAPRNLPFYERLGFTVTADVEVPEGPRTWCMTRKPGA

SEQ ID NO: 22952 - protein, 1134 aa, Artificial Sequence
  Synthetic Polypeptide
MALPVTALLLPLALLLHAARPACQVKLEESGGGLVQPGESLRLSCSASGSIFKVFRVFAMSWYRQGPGKQRELVASISSGETTTYAESVKGRFTISRDNAKNTAYLQMDSLKPEDTAVYYCNADHTFTGDFWGQGTQVTVSSGTGGGGSGGGGSGGGGSEFDIQMTQSPSSLSASVGDRVTITCKASDHINNWLAWYQQKPGQAPKLLIYGATTLETGVPSRFSGSGSGTDYTLTISSLQPEDFATYYCQQSWNTPWTFGQGTKLEIKRLEDLKNVFPPEVAVFEPSKAEIAHTQKATLVCLATGFYPDHVELSWWVNGKEVHSGVCTDPQPLKEQPALNDSRYCLSSRLRVSATFWQNPRNHFRCQVQFYGLSENDEWTQDRAKPVTQIVSAEAWGRADCGITSASYHQGVLSATILYEILLGKATLYAVLVSALVLMAMVKRKDSRGRAKRSGSGATNFSLLKQAGDVEENPGPTSATMDWIWRILFLVGAATGAHSGPQVQLQESGGGLAQAGGSLRLSCAASGRTFSMGWFRQAPGKEREFVAAITYSGGSPYYASSVRGRFTISRDNAKNTVYLQMNSLKPEDTAVYYCAANPTYGSDWNAENWGQGTQVTVSSGSGGGGSGGGGSGGGGSFEQVQLQQPGAELVKPGASVKMSCKASGYAFSSYWINWMKQKPGQGLEWIGQIYPGDGDTNYNGKFKGRATLTADTSSSTAYMQLSSLTSEDSAVYFCARSITTVVGCAMDYWGQGTSVTVSSTRIQNPDPAVYQLRDSKSSDKSVCLFTDFDSQTNVSQSKDSDVYITDKCVLDMRSMDFKSNSAVAWSNKSDFACANAFNNSIIPEDTFFPSSDVPCDVKLVEKSFETDTNLNFQNLSVIGFRILLLKVAGFNLLMTLRLWSSRAKRSGSGVKQTLNFDLLKLAGDVESNPGPSRGHMTEYKPTVRLATRDDVPRAVRTLAAAFADYPATRHTVDPDRHIERVTELQELFLTRVGLDIGKVWVADDGAAVAVWTTPESVEAGAVFAEIGPRMAELSGSRLAAQQQMEGLLAPHRPKEPAWFLATVGVSPDHQGKGLGSAVVLPGVEAAERAGVPAFLETSAPRNLPFYERLGFTVTADVEVPEGPRTWCMTRKPGA

SEQ ID NO: 22953 - protein, 1134 aa, Artificial Sequence
  Synthetic Polypeptide
MALPVTALLLPLALLLHAARPACQVKLEESGGGLVQPGESLRLSCSASGSIFKVFRVFAMSWYRQGPGKQRELVAEISSGETTTYADSVKGRFTISRDNAKNTAYLQMDSLKPEDTAVYYCNADHTFTGDFWGQGTQVTVSSGTGGGGSGGGGSGGGGSEFDIQMTQSPSSLSASVGDRVTITCKASDHINNWLAWYQQKPGQAPKLLIYGATTLETGVPSRFSGSGSGTDYTLTISSLQPEDFATYYCQQSWNTPWTFGQGTKLEIKRLEDLKNVFPPEVAVFEPSKAEIAHTQKATLVCLATGFYPDHVELSWWVNGKEVHSGVCTDPQPLKEQPALNDSRYCLSSRLRVSATFWQNPRNHFRCQVQFYGLSENDEWTQDRAKPVTQIVSAEAWGRADCGITSASYHQGVLSATILYEILLGKATLYAVLVSALVLMAMVKRKDSRGRAKRSGSGATNFSLLKQAGDVEENPGPTSATMDWIWRILFLVGAATGAHSGPQVQLQESGGGLAQAGGSLRLSCAASGRTFSMGWFRQAPGKEREFVAAITYSGGSPYYASSVRGRFTISRDNAKNTVYLQMNSLKPEDTAVYYCAANPTYGSDWNAENWGQGTQVTVSSGSGGGGSGGGGSGGGGSFEQVQLQQPGAELVKPGASVKMSCKASGYAFSSYWINWMKQKPGQGLEWIGQIYPGDGDTNYNGKFKGRATLTADTSSSTAYMQLSSLTSEDSAVYFCARSITTVVGCAMDYWGQGTSVTVSSTRIQNPDPAVYQLRDSKSSDKSVCLFTDFDSQTNVSQSKDSDVYITDKCVLDMRSMDFKSNSAVAWSNKSDFACANAFNNSIIPEDTFFPSSDVPCDVKLVEKSFETDTNLNFQNLSVIGFRILLLKVAGFNLLMTLRLWSSRAKRSGSGVKQTLNFDLLKLAGDVESNPGPSRGHMTEYKPTVRLATRDDVPRAVRTLAAAFADYPATRHTVDPDRHIERVTELQELFLTRVGLDIGKVWVADDGAAVAVWTTPESVEAGAVFAEIGPRMAELSGSRLAAQQQMEGLLAPHRPKEPAWFLATVGVSPDHQGKGLGSAVVLPGVEAAERAGVPAFLETSAPRNLPFYERLGFTVTADVEVPEGPRTWCMTRKPGA

SEQ ID NO: 22954 - protein, 1133 aa, Artificial Sequence
  Synthetic Polypeptide
MALPVTALLLPLALLLHAARPACEVQLLESGGGLIQPGGSLRLSCAASGFTFSSHAMTWVRQAPGKGLEWVSAISGSGDYTHYADSVKGRFTISRDNSKNTVYLQMNSLRAEDSAVYYCAKDEDGGSLLGHRGQGTLVTVSSGTGGGGSGGGGSGGGGSEFDIQMTQSPSSLSASVGDRVTITCKASDHINNWLAWYQQKPGQAPKLLIYGATTLETGVPSRFSGSGSGTDYTLTISSLQPEDFATYYCQQSWNTPWTFGQGTKLEIKRLEADVSPKPTIFLPSIAETKLQKAGTYLCLLEKFFPDVIKIHWQEKKSNTILGSQEGNTMKTNDTYMKFSWLTVPEKSLDKEHRCIVRHENNKNGVDQEIIFPPIKTDVITMDPKDNCSKDANDTLLLQLTNTSAYYMYLLLLLKSVVYFAIITCCLLRRTAFCCNGEKSRAKRSGSGATNFSLLKQAGDVEENPGPTSMDWIWRILFLVGAATGAHSGPQVQLQESGGGLAQAGGSLRLSCAASGRTFSMGWFRQAPGKEREFVAAITYSGGSPYYASSVRGRFTISRDNAKNTVYLQMNSLKPEDTAVYYCAANPTYGSDWNAENWGQGTQVTVSSGSGGGGSGGGGSGGGGSFEQVQLQQPGAELVKPGASVKMSCKASGYAFSSYWINWMKQKPGQGLEWIGQIYPGDGDTNYNGKFKGRATLTADTSSSTAYMQLSSLTSEDSAVYFCARSITTVVGCAMDYWGQGTSVTVSSTRPHTKPSVFVMKNGTNVACLVKEFYPKDIRINLVSSKKITEFDPAIVISPSGKYNAVKLGKYEDSNSVTCSVQHDNKTVHSTDFEVKTDSTDHVKPKETENTKQPSKSCHKPKAIVHTEKVNMMSLTVLGLRMLFAKTVAVNFLLTAKLFFLRAKRSGSGVKQTLNFDLLKLAGDVESNPGPSRGHMTEYKPTVRLATRDDVPRAVRTLAAAFADYPATRHTVDPDRHIERVTELQELFLTRVGLDIGKVWVADDGAAVAVWTTPESVEAGAVFAEIGPRMAELSGSRLAAQQQMEGLLAPHRPKEPAWFLATVGVSPDHQGKGLGSAVVLPGVEAAERAGVPAFLETSAPRNLPFYERLGFTVTADVEVPEGPRTWCMTRKPGA

SEQ ID NO: 22955 - protein, 1138 aa, Artificial Sequence
  Synthetic Polypeptide
MALPVTALLLPLALLLHAARPACEVQLLESGGGLIQPGGSLRLSCAASGFTFSSHAMTWVRQAPGKGLEWVSAISGSGDYTHYADSVKGRFTISRDNSKNTVYLQMNSLRAEDSAVYYCAKDEDGGSLLGHRGQGTLVTVSSGTGGGGSGGGGSGGGGSEFDIQMTQSPSSLSASVGDRVTITCKASDHINNWLAWYQQKPGQAPKLLIYGATTLETGVPSRFSGSGSGTDYTLTISSLQPEDFATYYCQQSWNTPWTFGQGTKLEIKRLEGQPKANPTVTLFPPSSEELQANKATLVCLISDFYPGAVTVAWKADGSPVKAGVETTKPSKQSNNKYAASSYLSLTPEQWKSHRSYSCQVTHEGSTVEKTVAPTECSGRADCGFTSESYQQGVLSATILYEILLGKATLYAVLVSALVLMAMVKRKDSRGRAKRSGSGATNFSLLKQAGDVEENPGPTSATMDWIWRILFLVGAATGAHSGPQVQLQESGGGLAQAGGSLRLSCAASGRTFSMGWFRQAPGKEREFVAAITYSGGSPYYASSVRGRFTISRDNAKNTVYLQMNSLKPEDTAVYYCAANPTYGSDWNAENWGQGTQVTVSSGSGGGGSGGGGSGGGGSFEQVQLQQPGAELVKPGASVKMSCKASGYAFSSYWINWMKQKPGQGLEWIGQIYPGDGDTNYNGKFKGRATLTADTSSSTAYMQLSSLTSEDSAVYFCARSITTVVGCAMDYWGQGTSVTVSSTRASTKGPSVFPLAPSSKSTSGGTAALGCLVKDYFPEPVTVSWNSGALTSGVHTFPAVLQSSGLYSLSSVVTVPSSSLGTQTYICNVNHKPSNTKVDKRVEPKSCIPEDTFFPSPESSCDVKLVEKSFETDTNLNFQNLSVIGFRILLLKVAGFNLLMTLRLWSSRAKRSGSGVKQTLNFDLLKLAGDVESNPGPSRGHMTEYKPTVRLATRDDVPRAVRTLAAAFADYPATRHTVDPDRHIERVTELQELFLTRVGLDIGKVWVADDGAAVAVWTTPESVEAGAVFAEIGPRMAELSGSRLAAQQQMEGLLAPHRPKEPAWFLATVGVSPDHQGKGLGSAVVLPGVEAAERAGVPAFLETSAPRNLPFYERLGFTVTADVEVPEGPRTWCMTRKPGA

SEQ ID NO: 22956 - protein, 1160 aa, Artificial Sequence
  Synthetic Polypeptide
MALPVTALLLPLALLLHAARPACEVQLLESGGGLIQPGGSLRLSCAASGFTFSSHAMTWVRQAPGKGLEWVSAISGSGDYTHYADSVKGRFTISRDNSKNTVYLQMNSLRAEDSAVYYCAKDEDGGSLLGHRGQGTLVTVSSGTGGGGSGGGGSGGGGSEFDIQMTQSPSSLSASVGDRVTITCKASDHINNWLAWYQQKPGQAPKLLIYGATTLETGVPSRFSGSGSGTDYTLTISSLQPEDFATYYCQQSWNTPWTFGQGTKLEIKRLEGQPKANPTVTLFPPSSEELQANKATLVCLISDFYPGAVTVAWKADGSPVKAGVETTKPSKQSNNKYAASSYLSLTPEQWKSHRSYSCQVTHEGSTVEKTVAPTECSPIKTDVITMDPKDNCSKDANDTLLLQLTNTSAYYMYLLLLLKSVVYFAIITCCLLRRTAFCCNGEKSRAKRSGSGATNFSLLKQAGDVEENPGPTSATMDWIWRILFLVGAATGAHSGPQVQLQESGGGLAQAGGSLRLSCAASGRTFSMGWFRQAPGKEREFVAAITYSGGSPYYASSVRGRFTISRDNAKNTVYLQMNSLKPEDTAVYYCAANPTYGSDWNAENWGQGTQVTVSSGSGGGGSGGGGSGGGGSFEQVQLQQPGAELVKPGASVKMSCKASGYAFSSYWINWMKQKPGQGLEWIGQIYPGDGDTNYNGKFKGRATLTADTSSSTAYMQLSSLTSEDSAVYFCARSITTVVGCAMDYWGQGTSVTVSSTRASTKGPSVFPLAPSSKSTSGGTAALGCLVKDYFPEPVTVSWNSGALTSGVHTFPAVLQSSGLYSLSSVVTVPSSSLGTQTYICNVNHKPSNTKVDKRVEPKSCEVKTDSTDHVKPKETENTKQPSKSCHKPKAIVHTEKVNMMSLTVLGLRMLFAKTVAVNFLLTAKLFFLRAKRSGSGVKQTLNFDLLKLAGDVESNPGPSRAHMTEYKPTVRLATRDDVPRAVRTLAAAFADYPATRHTVDPDRHIERVTELQELFLTRVGLDIGKVWVADDGAAVAVWTTPESVEAGAVFAEIGPRMAELSGSRLAAQQQMEGLLAPHRPKEPAWFLATVGVSPDHQGKGLGSAVVLPGVEAAERAGVPAFLETSAPRNLPFYERLGFTVTADVEVPEGPRTWCMTRKPGA

SEQ ID NO: 22957 - protein, 1278 aa, Artificial Sequence
  Synthetic Polypeptide
MALPVTALLLPLALLLHAARPQVQLVESGGGLVQPGGSLRLSCAASGFTFTNHAMSWVRQAPGKGLELVSSISGNGRTTYYADSVKGRFTISRDISKNTLDLQMNSLRAEDTAVYYCAKDGGETLVDSRGQGTLVTVSSLEGGGGSGGGGSIEGGGGSGGGGSKVQLLESGGGLVQPGGSLRLSCAASGFIFSSYAMSWVRQAPGKGQEWVSGVSGTGVNTYYADSVKGRFTISRDNSKNTLYLQMNSLRAEDTAVYYCASGKGWDSGSWYEDYRGQGTLVTVSSGTGGGGSGGGGSGGGGSEFDIQMTQSPSSLSASVGDRVTITCKASDHINNWLAWYQQKPGQAPKLLIYGATTLETGVPSRFSGSGSGTDYTLTISSLQPEDFATYYCQQSWNTPWTFGQGTKLEIKRLEIQNPDPAVYQLRDSKSSDKSVCLFTDFDSQTNVSQSKDSDVYITDKCVLDMRSMDFKSNSAVAWSNKSDFACANAFNNSIIPEDTFFPSSDVPCDVKLVEKSFETDTNLNFQNLSVIGFRILLLKVAGFNLLMTLRLWSSRAKRSGSGVKQTLNFDLLKLAGDVESNPGPTSATMDWIWRILFLVGAATGAHSGPQVQLQESGGGLAQAGGSLRLSCAASGRTFSMGWFRQAPGKEREFVAAITYSGGSPYYASSVRGRFTISRDNAKNTVYLQMNSLKPEDTAVYYCAANPTYGSDWNAENWGQGTQVTVSSGSGGGGSGGGGSGGGGSFEQVQLQQPGAELVKPGASVKMSCKASGYAFSSYWINWMKQKPGQGLEWIGQIYPGDGDTNYNGKFKGRATLTADTSSSTAYMQLSSLTSEDSAVYFCARSITTVVGCAMDYWGQGTSVTVSSTREDLKNVFPPEVAVFEPSKAEIAHTQKATLVCLATGFYPDHVELSWWVNGKEVHSGVCTDPQPLKEQPALNDSRYCLSSRLRVSATFWQNPRNHFRCQVQFYGLSENDEWTQDRAKPVTQIVSAEAWGRADCGITSASYHQGVLSATILYEILLGKATLYAVLVSALVLMAMVKRKDSRGRAKRSGSGATNFSLLKQAGDVEENPGPSRGHMTEYKPTVRLATRDDVPRAVRTLAAAFADYPATRHTVDPDRHIERVTELQELFLTRVGLDIGKVWVADDGAAVAVWTTPESVEAGAVFAEIGPRMAELSGSRLAAQQQMEGLLAPHRPKEPAWFLATVGVSPDHQGKGLGSAVVLPGVEAAERAGVPAFLETSAPRNLPFYERLGFTVTADVEVPEGPRTWCMTRKPGA

SEQ ID NO: 22958 - protein, 1277 aa, Artificial Sequence
  Synthetic Polypeptide
MALPVTALLLPLALLLHAARPQVQLVESGGGLVQPGGSLRLSCAASGFTFTNHAMSWVRQAPGKGLELVSSISGNGRTTYYADSVKGRFTISRDISKNTLDLQMNSLRAEDTAVYYCAKDGGETLVDSRGQGTLVTVSSLEGGGGSGGGGSIEGGGGSGGGGSKVQLLESGGGLVQPGGSLRLSCAASGFIFSSYAMSWVRQAPGKGQEWVSGVSGTGVNTYYADSVKGRFTISRDNSKNTLYLQMNSLRAEDTAVYYCASGKGWDSGSWYEDYRGQGTLVTVSSGTGGGGSGGGGSGGGGSEFDIQMTQSPSSLSASVGDRVTITCKASDHINNWLAWYQQKPGQAPKLLIYGATTLETGVPSRFSGSGSGTDYTLTISSLQPEDFATYYCQQSWNTPWTFGQGTKLEIKRLEDLKNVFPPEVAVFEPSKAEIAHTQKATLVCLATGFYPDHVELSWWVNGKEVHSGVCTDPQPLKEQPALNDSRYCLSSRLRVSATFWQNPRNHFRCQVQFYGLSENDEWTQDRAKPVTQIVSAEAWGRADCGITSASYHQGVLSATILYEILLGKATLYAVLVSALVLMAMVKRKDSRGRAKRSGSGATNFSLLKQAGDVEENPGPTSATMDWIWRILFLVGAATGAHSGPQVQLQESGGGLAQAGGSLRLSCAASGRTFSMGWFRQAPGKEREFVAAITYSGGSPYYASSVRGRFTISRDNAKNTVYLQMNSLKPEDTAVYYCAANPTYGSDWNAENWGQGTQVTVSSGSGGGGSGGGGSGGGGSFEQVQLQQPGAELVKPGASVKMSCKASGYAFSSYWINWMKQKPGQGLEWIGQIYPGDGDTNYNGKFKGRATLTADTSSSTAYMQLSSLTSEDSAVYFCARSITTVVGCAMDYWGQGTSVTVSSTRIQNPDPAVYQLRDSKSSDKSVCLFTDFDSQTNVSQSKDSDVYITDKCVLDMRSMDFKSNSAVAWSNKSDFACANAFNNSIIPEDTFFPSSDVPCDVKLVEKSFETDTNLNFQNLSVIGFRILLLKVAGFNLLMTLRLWSSRAKRSGSGVKQTLNFDLLKLAGDVESNPGPSRGHMTEYKPTVRLATRDDVPRAVRTLAAAFADYPATRHTVDPDRHIERVTELQELFLTRVGLDIGKVWVADDGAAVAVWTTPESVEAGAVFAEIGPRMAELSGSRLAAQQQMEGLLAPHRPKEPAWFLATVGVSPDHQGKGLGSAVVLPGVEAAERAGVPAFLETSAPRNLPFYERLGFTVTADVEVPEGPRTWCMTRKPGA

SEQ ID NO: 22959 - protein, 964 aa, Artificial Sequence
  Synthetic Polypeptide
MALPVTALLLPLALLLHAARPMLPAPKNLVVSRITEDSARLSWTAPDAAFDSFPIRYIETLIWGEAIWLDVPGSERSYDLTGLKPGTEYAVVITGVKGGRFSSPLVASFTTGTGGGGSGGGGSGGGGSEFDIQMTQSPSSLSASVGDRVTITCRASQDISNYLNWYQQKPGKAVKLLIYYTSILHSGVPSRFSGSGSGTDYTLTISSLQPEDFATYFCQQGNTLPWTFGGGTKVEIKLEDLKNVFPPEVAVFEPSEAEISHTQKATLVCLATGFYPDHVELSWWVNGKEVHSGVCTDPQPLKEQPALNDSRYCLSSRLRVSATFWQNPRNHFRCQVQFYGLSENDEWTQDRAKPVTQIVSAEAWGRADCGFTSESYQQGVLSATILYEILLGKATLYAVLVSALVLMAMVKRKDSRGRAKRSGSGATNFSLLKQAGDVEENPGPTSMDWIWRILFLVGAATGAHSFEVQLVESGGGLVKPGGSLKLSCAASGFAFSIYDMSWVRQAPGKGLEWVAYISSGGGTTYYPDTVKGRFTISRDNAKNTLYLQMSSLRAEDTAMYYCARHSGYGSSYGVLFAYWGQGTLVTVSSTRIQNPDPAVYQLRDSKSSDKSVCLFTDFDSQTNVSQSKDSDVYITDKCVLDMRSMDFKSNSAVAWSNKSDFACANAFNNSIIPEDTFFPSPESSCDVKLVEKSFETDTNLNFQNLSVIGFRILLLKVAGFNLLMTLRLWSSRAKRSGSGVKQTLNFDLLKLAGDVESNPGPSRGHMTEYKPTVRLATRDDVPRAVRTLAAAFADYPATRHTVDPDRHIERVTELQELFLTRVGLDIGKVWVADDGAAVAVWTTPESVEAGAVFAEIGPRMAELSGSRLAAQQQMEGLLAPHRPKEPAWFLATVGVSPDHQGKGLGSAVVLPGVEAAERAGVPAFLETSAPRNLPFYERLGFTVTADVEVPEGPRTWCMTRKPGA

SEQ ID NO: 22960 - protein, 1160 aa, Artificial Sequence
  Synthetic Polypeptide
MALPVTALLLPLALLLHAARPACEVQLLESGGGLIQPGGSLRLSCAASGFTFSSHAMTWVRQAPGKGLEWVSAISGSGDYTHYADSVKGRFTISRDNSKNTVYLQMNSLRAEDSAVYYCAKDEDGGSLLGHRGQGTLVTVSSGTGGGGSGGGGSGGGGSEFDIQMTQSPSSLSASVGDRVTITCRASQDISNYLNWYQQKPGKAVKLLIYYTSILHSGVPSRFSGSGSGTDYTLTISSLQPEDFATYFCQQGNTLPWTFGGGTKVEIKLEGQPKANPTVTLFPPSSEELQANKATLVCLISDFYPGAVTVAWKADGSPVKAGVETTKPSKQSNNKYAASSYLSLTPEQWKSHRSYSCQVTHEGSTVEKTVAPTECSPIKTDVITMDPKDNCSKDANDTLLLQLTNTSAYYMYLLLLLKSVVYFAIITCCLLRRTAFCCNGEKSRAKRSGSGATNFSLLKQAGDVEENPGPTSATMDWIWRILFLVGAATGAHSGPQVQLQESGGGLAQAGGSLRLSCAASGRTFSMGWFRQAPGKEREFVAAITYSGGSPYYASSVRGRFTISRDNAKNTVYLQMNSLKPEDTAVYYCAANPTYGSDWNAENWGQGTQVTVSSGSGGGGSGGGGSGGGGSFEVQLVESGGGLVKPGGSLKLSCAASGFAFSIYDMSWVRQAPGKGLEWVAYISSGGGTTYYPDTVKGRFTISRDNAKNTLYLQMSSLRAEDTAMYYCARHSGYGSSYGVLFAYWGQGTLVTVSSTRASTKGPSVFPLAPSSKSTSGGTAALGCLVKDYFPEPVTVSWNSGALTSGVHTFPAVLQSSGLYSLSSVVTVPSSSLGTQTYICNVNHKPSNTKVDKRVEPKSCEVKTDSTDHVKPKETENTKQPSKSCHKPKAIVHTEKVNMMSLTVLGLRMLFAKTVAVNFLLTAKLFFLRAKRSGSGVKQTLNFDLLKLAGDVESNPGPSRGHMTEYKPTVRLATRDDVPRAVRTLAAAFADYPATRHTVDPDRHIERVTELQELFLTRVGLDIGKVWVADDGAAVAVWTTPESVEAGAVFAEIGPRMAELSGSRLAAQQQMEGLLAPHRPKEPAWFLATVGVSPDHQGKGLGSAVVLPGVEAAERAGVPAFLETSAPRNLPFYERLGFTVTADVEVPEGPRTWCMTRKPGA

SEQ ID NO: 22961 - protein, 1138 aa, Artificial Sequence
  Synthetic Polypeptide
MALPVTALLLPLALLLHAARPACEVQLLESGGGLIQPGGSLRLSCAASGFTFSSHAMTWVRQAPGKGLEWVSAISGSGDYTHYADSVKGRFTISRDNSKNTVYLQMNSLRAEDSAVYYCAKDEDGGSLLGHRGQGTLVTVSSGTGGGGSGGGGSGGGGSEFDIQMTQSPSSLSASVGDRVTITCRASQDISNYLNWYQQKPGKAVKLLIYYTSILHSGVPSRFSGSGSGTDYTLTISSLQPEDFATYFCQQGNTLPWTFGGGTKVEIKLEGQPKANPTVTLFPPSSEELQANKATLVCLISDFYPGAVTVAWKADGSPVKAGVETTKPSKQSNNKYAASSYLSLTPEQWKSHRSYSCQVTHEGSTVEKTVAPTECSGRADCGFTSESYQQGVLSATILYEILLGKATLYAVLVSALVLMAMVKRKDSRGRAKRSGSGATNFSLLKQAGDVEENPGPTSATMDWIWRILFLVGAATGAHSGPQVQLQESGGGLAQAGGSLRLSCAASGRTFSMGWFRQAPGKEREFVAAITYSGGSPYYASSVRGRFTISRDNAKNTVYLQMNSLKPEDTAVYYCAANPTYGSDWNAENWGQGTQVTVSSGSGGGGSGGGGSGGGGSFEVQLVESGGGLVKPGGSLKLSCAASGFAFSIYDMSWVRQAPGKGLEWVAYISSGGGTTYYPDTVKGRFTISRDNAKNTLYLQMSSLRAEDTAMYYCARHSGYGSSYGVLFAYWGQGTLVTVSSTRASTKGPSVFPLAPSSKSTSGGTAALGCLVKDYFPEPVTVSWNSGALTSGVHTFPAVLQSSGLYSLSSVVTVPSSSLGTQTYICNVNHKPSNTKVDKRVEPKSCIPEDTFFPSPESSCDVKLVEKSFETDTNLNFQNLSVIGFRILLLKVAGFNLLMTLRLWSSRAKRSGSGVKQTLNFDLLKLAGDVESNPGPSRGHMTEYKPTVRLATRDDVPRAVRTLAAAFADYPATRHTVDPDRHIERVTELQELFLTRVGLDIGKVWVADDGAAVAVWTTPESVEAGAVFAEIGPRMAELSGSRLAAQQQMEGLLAPHRPKEPAWFLATVGVSPDHQGKGLGSAVVLPGVEAAERAGVPAFLETSAPRNLPFYERLGFTVTADVEVPEGPRTWCMTRKPGA

SEQ ID NO: 22962 - protein, 1133 aa, Artificial Sequence
  Synthetic Polypeptide
MALPVTALLLPLALLLHAARPACEVQLLESGGGLIQPGGSLRLSCAASGFTFSSHAMTWVRQAPGKGLEWVSAISGSGDYTHYADSVKGRFTISRDNSKNTVYLQMNSLRAEDSAVYYCAKDEDGGSLLGHRGQGTLVTVSSGTGGGGSGGGGSGGGGSEFDIQMTQSPSSLSASVGDRVTITCRASQDISNYLNWYQQKPGKAVKLLIYYTSILHSGVPSRFSGSGSGTDYTLTISSLQPEDFATYFCQQGNTLPWTFGGGTKVEIKLEADVSPKPTIFLPSIAETKLQKAGTYLCLLEKFFPDVIKIHWQEKKSNTILGSQEGNTMKTNDTYMKFSWLTVPEKSLDKEHRCIVRHENNKNGVDQEIIFPPIKTDVITMDPKDNCSKDANDTLLLQLTNTSAYYMYLLLLLKSVVYFAIITCCLLRRTAFCCNGEKSRAKRSGSGATNFSLLKQAGDVEENPGPTSMDWIWRILFLVGAATGAHSGPQVQLQESGGGLAQAGGSLRLSCAASGRTFSMGWFRQAPGKEREFVAAITYSGGSPYYASSVRGRFTISRDNAKNTVYLQMNSLKPEDTAVYYCAANPTYGSDWNAENWGQGTQVTVSSGSGGGGSGGGGSGGGGSFEVQLVESGGGLVKPGGSLKLSCAASGFAFSIYDMSWVRQAPGKGLEWVAYISSGGGTTYYPDTVKGRFTISRDNAKNTLYLQMSSLRAEDTAMYYCARHSGYGSSYGVLFAYWGQGTLVTVSSTRPHTKPSVFVMKNGTNVACLVKEFYPKDIRINLVSSKKITEFDPAIVISPSGKYNAVKLGKYEDSNSVTCSVQHDNKTVHSTDFEVKTDSTDHVKPKETENTKQPSKSCHKPKAIVHTEKVNMMSLTVLGLRMLFAKTVAVNFLLTAKLFFLRAKRSGSGVKQTLNFDLLKLAGDVESNPGPSRGHMTEYKPTVRLATRDDVPRAVRTLAAAFADYPATRHTVDPDRHIERVTELQELFLTRVGLDIGKVWVADDGAAVAVWTTPESVEAGAVFAEIGPRMAELSGSRLAAQQQMEGLLAPHRPKEPAWFLATVGVSPDHQGKGLGSAVVLPGVEAAERAGVPAFLETSAPRNLPFYERLGFTVTADVEVPEGPRTWCMTRKPGA

SEQ ID NO: 22963 - protein, 1156 aa, Artificial Sequence
  Synthetic Polypeptide
MALPVTALLLPLALLLHAARPACEVQLLESGGGLIQPGGSLRLSCAASGFTFSSHAMTWVRQAPGKGLEWVSAISGSGDYTHYADSVKGRFTISRDNSKNTVYLQMNSLRAEDSAVYYCAKDEDGGSLLGHRGQGTLVTVSSGTGGGGSGGGGSGGGGSEFDVVMTQSPSSLSASVGDRVTITCMASEDIYIRLAWYQQKPGNAPKLLIYAATSLETGVPSRFSGSGSGTDFTLTISSLQPEDFATYYCQQYWSSPWTFGGGTKVEIKLEGQPKANPTVTLFPPSSEELQANKATLVCLISDFYPGAVTVAWKADGSPVKAGVETTKPSKQSNNKYAASSYLSLTPEQWKSHRSYSCQVTHEGSTVEKTVAPTECSPIKTDVITMDPKDNCSKDANDTLLLQLTNTSAYYMYLLLLLKSVVYFAIITCCLLRRTAFCCNGEKSRAKRSGSGATNFSLLKQAGDVEENPGPTSATMDWIWRILFLVGAATGAHSGPQVQLQESGGGLAQAGGSLRLSCAASGRTFSMGWFRQAPGKEREFVAAITYSGGSPYYASSVRGRFTISRDNAKNTVYLQMNSLKPEDTAVYYCAANPTYGSDWNAENWGQGTQVTVSSGSGGGGSGGGGSGGGGSFEQVQLQESGPGLVKPSQTLSLTCTVSGYSITSDYTWNWIRQPPGNGLEWIGYITYSGSTSYNPSLKSRVLISVDTSKNQVSLKLSSVTAADTAVYYCARLGRRYTMDYWGQGTTVTVSSTRASTKGPSVFPLAPSSKSTSGGTAALGCLVKDYFPEPVTVSWNSGALTSGVHTFPAVLQSSGLYSLSSVVTVPSSSLGTQTYICNVNHKPSNTKVDKRVEPKSCEVKTDSTDHVKPKETENTKQPSKSCHKPKAIVHTEKVNMMSLTVLGLRMLFAKTVAVNFLLTAKLFFLRAKRSGSGVKQTLNFDLLKLAGDVESNPGPSRGHMTEYKPTVRLATRDDVPRAVRTLAAAFADYPATRHTVDPDRHIERVTELQELFLTRVGLDIGKVWVADDGAAVAVWTTPESVEAGAVFAEIGPRMAELSGSRLAAQQQMEGLLAPHRPKEPAWFLATVGVSPDHQGKGLGSAVVLPGVEAAERAGVPAFLETSAPRNLPFYERLGFTVTADVEVPEGPRTWCMTRKPGA

SEQ ID NO: 22964 - protein, 1134 aa, Artificial Sequence
  Synthetic Polypeptide
MALPVTALLLPLALLLHAARPACEVQLLESGGGLIQPGGSLRLSCAASGFTFSSHAMTWVRQAPGKGLEWVSAISGSGDYTHYADSVKGRFTISRDNSKNTVYLQMNSLRAEDSAVYYCAKDEDGGSLLGHRGQGTLVTVSSGTGGGGSGGGGSGGGGSEFDVVMTQSPSSLSASVGDRVTITCMASEDIYIRLAWYQQKPGNAPKLLIYAATSLETGVPSRFSGSGSGTDFTLTISSLQPEDFATYYCQQYWSSPWTFGGGTKVEIKLEGQPKANPTVTLFPPSSEELQANKATLVCLISDFYPGAVTVAWKADGSPVKAGVETTKPSKQSNNKYAASSYLSLTPEQWKSHRSYSCQVTHEGSTVEKTVAPTECSGRADCGFTSESYQQGVLSATILYEILLGKATLYAVLVSALVLMAMVKRKDSRGRAKRSGSGATNFSLLKQAGDVEENPGPTSATMDWIWRILFLVGAATGAHSGPQVQLQESGGGLAQAGGSLRLSCAASGRTFSMGWFRQAPGKEREFVAAITYSGGSPYYASSVRGRFTISRDNAKNTVYLQMNSLKPEDTAVYYCAANPTYGSDWNAENWGQGTQVTVSSGSGGGGSGGGGSGGGGSFEQVQLQESGPGLVKPSQTLSLTCTVSGYSITSDYTWNWIRQPPGNGLEWIGYITYSGSTSYNPSLKSRVLISVDTSKNQVSLKLSSVTAADTAVYYCARLGRRYTMDYWGQGTTVTVSSTRASTKGPSVFPLAPSSKSTSGGTAALGCLVKDYFPEPVTVSWNSGALTSGVHTFPAVLQSSGLYSLSSVVTVPSSSLGTQTYICNVNHKPSNTKVDKRVEPKSCIPEDTFFPSPESSCDVKLVEKSFETDTNLNFQNLSVIGFRILLLKVAGFNLLMTLRLWSSRAKRSGSGVKQTLNFDLLKLAGDVESNPGPSRGHMTEYKPTVRLATRDDVPRAVRTLAAAFADYPATRHTVDPDRHIERVTELQELFLTRVGLDIGKVWVADDGAAVAVWTTPESVEAGAVFAEIGPRMAELSGSRLAAQQQMEGLLAPHRPKEPAWFLATVGVSPDHQGKGLGSAVVLPGVEAAERAGVPAFLETSAPRNLPFYERLGFTVTADVEVPEGPRTWCMTRKPGA

SEQ ID NO: 22965 - protein, 1129 aa, Artificial Sequence
  Synthetic Polypeptide
MALPVTALLLPLALLLHAARPACEVQLLESGGGLIQPGGSLRLSCAASGFTFSSHAMTWVRQAPGKGLEWVSAISGSGDYTHYADSVKGRFTISRDNSKNTVYLQMNSLRAEDSAVYYCAKDEDGGSLLGHRGQGTLVTVSSGTGGGGSGGGGSGGGGSEFDVVMTQSPSSLSASVGDRVTITCMASEDIYIRLAWYQQKPGNAPKLLIYAATSLETGVPSRFSGSGSGTDFTLTISSLQPEDFATYYCQQYWSSPWTFGGGTKVEIKLEADVSPKPTIFLPSIAETKLQKAGTYLCLLEKFFPDVIKIHWQEKKSNTILGSQEGNTMKTNDTYMKFSWLTVPEKSLDKEHRCIVRHENNKNGVDQEIIFPPIKTDVITMDPKDNCSKDANDTLLLQLTNTSAYYMYLLLLLKSVVYFAIITCCLLRRTAFCCNGEKSRAKRSGSGATNFSLLKQAGDVEENPGPTSMDWIWRILFLVGAATGAHSGPQVQLQESGGGLAQAGGSLRLSCAASGRTFSMGWFRQAPGKEREFVAAITYSGGSPYYASSVRGRFTISRDNAKNTVYLQMNSLKPEDTAVYYCAANPTYGSDWNAENWGQGTQVTVSSGSGGGGSGGGGSGGGGSFEQVQLQESGPGLVKPSQTLSLTCTVSGYSITSDYTWNWIRQPPGNGLEWIGYITYSGSTSYNPSLKSRVLISVDTSKNQVSLKLSSVTAADTAVYYCARLGRRYTMDYWGQGTTVTVSSTRPHTKPSVFVMKNGTNVACLVKEFYPKDIRINLVSSKKITEFDPAIVISPSGKYNAVKLGKYEDSNSVTCSVQHDNKTVHSTDFEVKTDSTDHVKPKETENTKQPSKSCHKPKAIVHTEKVNMMSLTVLGLRMLFAKTVAVNFLLTAKLFFLRAKRSGSGVKQTLNFDLLKLAGDVESNPGPSRGHMTEYKPTVRLATRDDVPRAVRTLAAAFADYPATRHTVDPDRHIERVTELQELFLTRVGLDIGKVWVADDGAAVAVWTTPESVEAGAVFAEIGPRMAELSGSRLAAQQQMEGLLAPHRPKEPAWFLATVGVSPDHQGKGLGSAVVLPGVEAAERAGVPAFLETSAPRNLPFYERLGFTVTADVEVPEGPRTWCMTRKPGA

SEQ ID NO: 22966 - protein, 965 aa, Artificial Sequence
  Synthetic Polypeptide
MALPVTALLLPLALLLHAARPMLPAPKNLVVSRITEDSARLSWTAPDAAFDSFPIRYIETLIWGEAIWLDVPGSERSYDLTGLKPGTEYAVVITGVKGGRFSSPLVASFTTGTGGGGSGGGGSGGGGSEFSYVLTQPPSVSVAPGQTARITCGGNNIGGKSVHWYQQPPGQAPVVVVYDDSDRPSGIPERFSGSNSGNTATLTISRVEAGDEAVYYCQVWDSSSDHVVFGGGTKLTVLLEDLKNVFPPEVAVFEPSEAEISHTQKATLVCLATGFYPDHVELSWWVNGKEVHSGVCTDPQPLKEQPALNDSRYCLSSRLRVSATFWQNPRNHFRCQVQFYGLSENDEWTQDRAKPVTQIVSAEAWGRADCGFTSESYQQGVLSATILYEILLGKATLYAVLVSALVLMAMVKRKDSRGRAKRSGSGATNFSLLKQAGDVEENPGPTSMDWIWRILFLVGAATGAHSFEQLQLQESGPGLVKPSETLSLTCTVSGGSISSSSYFWGWIRQPPGKGLEWIGSIYYSGITYYNPSLKSRVTISVDTSKNQFSLKLSSVTAADTAVYYCARHDGAVAGLFDYWGQGTLVTVSSATRIQNPDPAVYQLRDSKSSDKSVCLFTDFDSQTNVSQSKDSDVYITDKCVLDMRSMDFKSNSAVAWSNKSDFACANAFNNSIIPEDTFFPSPESSCDVKLVEKSFETDTNLNFQNLSVIGFRILLLKVAGFNLLMTLRLWSSRAKRSGSGVKQTLNFDLLKLAGDVESNPGPSRGHMTEYKPTVRLATRDDVPRAVRTLAAAFADYPATRHTVDPDRHIERVTELQELFLTRVGLDIGKVWVADDGAAVAVWTTPESVEAGAVFAEIGPRMAELSGSRLAAQQQMEGLLAPHRPKEPAWFLATVGVSPDHQGKGLGSAVVLPGVEAAERAGVPAFLETSAPRNLPFYERLGFTVTADVEVPEGPRTWCMTRKPGA

SEQ ID NO: 22967 - protein, 996 aa, Artificial Sequence
  Synthetic Polypeptide
MALPVTALLLPLALLLHAARPEVQLLESGGGLVQPGGSLRLSCAASGFTFSSYAMSWVRQAPGKGLEWVSSISGSGDYIYYADSVKGRFTISRDISKNTLYLQMNSLRAEDTAVYYCAKEGTGANSSLADYRGQGTLVTVSSGTGGGGSGGGGSGGGGSEFSYVLTQPPSVSVAPGQTARITCGGNNIGGKSVHWYQQPPGQAPVVVVYDDSDRPSGIPERFSGSNSGNTATLTISRVEAGDEAVYYCQVWDSSSDHVVFGGGTKLTVLLEDLKNVFPPEVAVFEPSEAEISHTQKATLVCLATGFYPDHVELSWWVNGKEVHSGVCTDPQPLKEQPALNDSRYCLSSRLRVSATFWQNPRNHFRCQVQFYGLSENDEWTQDRAKPVTQIVSAEAWGRADCGFTSESYQQGVLSATILYEILLGKATLYAVLVSALVLMAMVKRKDSRGRAKRSGSGATNFSLLKQAGDVEENPGPTSMDWIWRILFLVGAATGAHSFEQLQLQESGPGLVKPSETLSLTCTVSGGSISSSSYFWGWIRQPPGKGLEWIGSIYYSGITYYNPSLKSRVTISVDTSKNQFSLKLSSVTAADTAVYYCARHDGAVAGLFDYWGQGTLVTVSSATRIQNPDPAVYQLRDSKSSDKSVCLFTDFDSQTNVSQSKDSDVYITDKCVLDMRSMDFKSNSAVAWSNKSDFACANAFNNSIIPEDTFFPSPESSCDVKLVEKSFETDTNLNFQNLSVIGFRILLLKVAGFNLLMTLRLWSSRAKRSGSGVKQTLNFDLLKLAGDVESNPGPSRGHMTEYKPTVRLATRDDVPRAVRTLAAAFADYPATRHTVDPDRHIERVTELQELFLTRVGLDIGKVWVADDGAAVAVWTTPESVEAGAVFAEIGPRMAELSGSRLAAQQQMEGLLAPHRPKEPAWFLATVGVSPDHQGKGLGSAVVLPGVEAAERAGVPAFLETSAPRNLPFYERLGFTVTADVEVPEGPRTWCMTRKPGA

SEQ ID NO: 22968 - protein, 1161 aa, Artificial Sequence
  Synthetic Polypeptide
MALPVTALLLPLALLLHAARPACEVQLLESGGGLIQPGGSLRLSCAASGFTFSSHAMTWVRQAPGKGLEWVSAISGSGDYTHYADSVKGRFTISRDNSKNTVYLQMNSLRAEDSAVYYCAKDEDGGSLLGHRGQGTLVTVSSGTGGGGSGGGGSGGGGSEFSYVLTQPPSVSVAPGQTARITCGGNNIGGKSVHWYQQPPGQAPVVVVYDDSDRPSGIPERFSGSNSGNTATLTISRVEAGDEAVYYCQVWDSSSDHVVFGGGTKLTVLLEGQPKANPTVTLFPPSSEELQANKATLVCLISDFYPGAVTVAWKADGSPVKAGVETTKPSKQSNNKYAASSYLSLTPEQWKSHRSYSCQVTHEGSTVEKTVAPTECSPIKTDVITMDPKDNCSKDANDTLLLQLTNTSAYYMYLLLLLKSVVYFAIITCCLLRRTAFCCNGEKSRAKRSGSGATNFSLLKQAGDVEENPGPTSATMDWIWRILFLVGAATGAHSGPQVQLQESGGGLAQAGGSLRLSCAASGRTFSMGWFRQAPGKEREFVAAITYSGGSPYYASSVRGRFTISRDNAKNTVYLQMNSLKPEDTAVYYCAANPTYGSDWNAENWGQGTQVTVSSGSGGGGSGGGGSGGGGSFEQLQLQESGPGLVKPSETLSLTCTVSGGSISSSSYFWGWIRQPPGKGLEWIGSIYYSGITYYNPSLKSRVTISVDTSKNQFSLKLSSVTAADTAVYYCARHDGAVAGLFDYWGQGTLVTVSSATRASTKGPSVFPLAPSSKSTSGGTAALGCLVKDYFPEPVTVSWNSGALTSGVHTFPAVLQSSGLYSLSSVVTVPSSSLGTQTYICNVNHKPSNTKVDKRVEPKSCEVKTDSTDHVKPKETENTKQPSKSCHKPKAIVHTEKVNMMSLTVLGLRMLFAKTVAVNFLLTAKLFFLRAKRSGSGVKQTLNFDLLKLAGDVESNPGPSRGHMTEYKPTVRLATRDDVPRAVRTLAAAFADYPATRHTVDPDRHIERVTELQELFLTRVGLDIGKVWVADDGAAVAVWTTPESVEAGAVFAEIGPRMAELSGSRLAAQQQMEGLLAPHRPKEPAWFLATVGVSPDHQGKGLGSAVVLPGVEAAERAGVPAFLETSAPRNLPFYERLGFTVTADVEVPEGPRTWCMTRKPGA

SEQ ID NO: 22969 - protein, 1139 aa, Artificial Sequence
  Synthetic Polypeptide
MALPVTALLLPLALLLHAARPACEVQLLESGGGLIQPGGSLRLSCAASGFTFSSHAMTWVRQAPGKGLEWVSAISGSGDYTHYADSVKGRFTISRDNSKNTVYLQMNSLRAEDSAVYYCAKDEDGGSLLGHRGQGTLVTVSSGTGGGGSGGGGSGGGGSEFSYVLTQPPSVSVAPGQTARITCGGNNIGGKSVHWYQQPPGQAPVVVVYDDSDRPSGIPERFSGSNSGNTATLTISRVEAGDEAVYYCQVWDSSSDHVVFGGGTKLTVLLEGQPKANPTVTLFPPSSEELQANKATLVCLISDFYPGAVTVAWKADGSPVKAGVETTKPSKQSNNKYAASSYLSLTPEQWKSHRSYSCQVTHEGSTVEKTVAPTECSGRADCGFTSESYQQGVLSATILYEILLGKATLYAVLVSALVLMAMVKRKDSRGRAKRSGSGATNFSLLKQAGDVEENPGPTSATMDWIWRILFLVGAATGAHSGPQVQLQESGGGLAQAGGSLRLSCAASGRTFSMGWFRQAPGKEREFVAAITYSGGSPYYASSVRGRFTISRDNAKNTVYLQMNSLKPEDTAVYYCAANPTYGSDWNAENWGQGTQVTVSSGSGGGGSGGGGSGGGGSFEQLQLQESGPGLVKPSETLSLTCTVSGGSISSSSYFWGWIRQPPGKGLEWIGSIYYSGITYYNPSLKSRVTISVDTSKNQFSLKLSSVTAADTAVYYCARHDGAVAGLFDYWGQGTLVTVSSATRASTKGPSVFPLAPSSKSTSGGTAALGCLVKDYFPEPVTVSWNSGALTSGVHTFPAVLQSSGLYSLSSVVTVPSSSLGTQTYICNVNHKPSNTKVDKRVEPKSCIPEDTFFPSPESSCDVKLVEKSFETDTNLNFQNLSVIGFRILLLKVAGFNLLMTLRLWSSRAKRSGSGVKQTLNFDLLKLAGDVESNPGPSRGHMTEYKPTVRLATRDDVPRAVRTLAAAFADYPATRHTVDPDRHIERVTELQELFLTRVGLDIGKVWVADDGAAVAVWTTPESVEAGAVFAEIGPRMAELSGSRLAAQQQMEGLLAPHRPKEPAWFLATVGVSPDHQGKGLGSAVVLPGVEAAERAGVPAFLETSAPRNLPFYERLGFTVTADVEVPEGPRTWCMTRKPGA

SEQ ID NO: 22970 - protein, 1134 aa, Artificial Sequence
  Synthetic Polypeptide
MALPVTALLLPLALLLHAARPACEVQLLESGGGLIQPGGSLRLSCAASGFTFSSHAMTWVRQAPGKGLEWVSAISGSGDYTHYADSVKGRFTISRDNSKNTVYLQMNSLRAEDSAVYYCAKDEDGGSLLGHRGQGTLVTVSSGTGGGGSGGGGSGGGGSEFSYVLTQPPSVSVAPGQTARITCGGNNIGGKSVHWYQQPPGQAPVVVVYDDSDRPSGIPERFSGSNSGNTATLTISRVEAGDEAVYYCQVWDSSSDHVVFGGGTKLTVLLEADVSPKPTIFLPSIAETKLQKAGTYLCLLEKFFPDVIKIHWQEKKSNTILGSQEGNTMKTNDTYMKFSWLTVPEKSLDKEHRCIVRHENNKNGVDQEIIFPPIKTDVITMDPKDNCSKDANDTLLLQLTNTSAYYMYLLLLLKSVVYFAIITCCLLRRTAFCCNGEKSRAKRSGSGATNFSLLKQAGDVEENPGPTSMDWIWRILFLVGAATGAHSGPQVQLQESGGGLAQAGGSLRLSCAASGRTFSMGWFRQAPGKEREFVAAITYSGGSPYYASSVRGRFTISRDNAKNTVYLQMNSLKPEDTAVYYCAANPTYGSDWNAENWGQGTQVTVSSGSGGGGSGGGGSGGGGSFEQLQLQESGPGLVKPSETLSLTCTVSGGSISSSSYFWGWIRQPPGKGLEWIGSIYYSGITYYNPSLKSRVTISVDTSKNQFSLKLSSVTAADTAVYYCARHDGAVAGLFDYWGQGTLVTVSSATRPHTKPSVFVMKNGTNVACLVKEFYPKDIRINLVSSKKITEFDPAIVISPSGKYNAVKLGKYEDSNSVTCSVQHDNKTVHSTDFEVKTDSTDHVKPKETENTKQPSKSCHKPKAIVHTEKVNMMSLTVLGLRMLFAKTVAVNFLLTAKLFFLRAKRSGSGVKQTLNFDLLKLAGDVESNPGPSRGHMTEYKPTVRLATRDDVPRAVRTLAAAFADYPATRHTVDPDRHIERVTELQELFLTRVGLDIGKVWVADDGAAVAVWTTPESVEAGAVFAEIGPRMAELSGSRLAAQQQMEGLLAPHRPKEPAWFLATVGVSPDHQGKGLGSAVVLPGVEAAERAGVPAFLETSAPRNLPFYERLGFTVTADVEVPEGPRTWCMTRKPGA

SEQ ID NO: 22971 - protein, 964 aa, Artificial Sequence
  Synthetic Polypeptide
MALPVTALLLPLALLLHAARPMLPAPKNLVVSRITEDSARLSWTAPDAAFDSFPIRYIETLIWGEAIWLDVPGSERSYDLTGLKPGTEYAVVITGVKGGRFSSPLVASFTTGTGGGGSGGGGSGGGGSEFEIVLTQSPATLSLSPGERATLSCRASQSVSSYLAWYQQKPGQAPRLLIYDASNRATGIPARFSGSGSGTDFTLTISSLEPEDFAVYYCQQRSNWPITFGQGTRLEIKLEDLKNVFPPEVAVFEPSEAEISHTQKATLVCLATGFYPDHVELSWWVNGKEVHSGVCTDPQPLKEQPALNDSRYCLSSRLRVSATFWQNPRNHFRCQVQFYGLSENDEWTQDRAKPVTQIVSAEAWGRADCGFTSESYQQGVLSATILYEILLGKATLYAVLVSALVLMAMVKRKDSRGRAKRSGSGATNFSLLKQAGDVEENPGPTSMDWIWRILFLVGAATGAHSFEEVQLVESGGGLVQPGRSLRLSCAASGFTFNDYAMHWVRQAPGKGLEWVSTISWNSGSIGYADSVKGRFTISRDNAKKSLYLQMNSLRAEDTALYYCAKDIQYGNYYYGMDVWGQGTTVTVSSTRIQNPDPAVYQLRDSKSSDKSVCLFTDFDSQTNVSQSKDSDVYITDKCVLDMRSMDFKSNSAVAWSNKSDFACANAFNNSIIPEDTFFPSPESSCDVKLVEKSFETDTNLNFQNLSVIGFRILLLKVAGFNLLMTLRLWSSRAKRSGSGVKQTLNFDLLKLAGDVESNPGPSRGHMTEYKPTVRLATRDDVPRAVRTLAAAFADYPATRHTVDPDRHIERVTELQELFLTRVGLDIGKVWVADDGAAVAVWTTPESVEAGAVFAEIGPRMAELSGSRLAAQQQMEGLLAPHRPKEPAWFLATVGVSPDHQGKGLGSAVVLPGVEAAERAGVPAFLETSAPRNLPFYERLGFTVTADVEVPEGPRTWCMTRKPGA

SEQ ID NO: 22972 - protein, 995 aa, Artificial Sequence
  Synthetic Polypeptide
MALPVTALLLPLALLLHAARPEVQLLESGGGLVQPGGSLRLSCAASGFTFSSYAMSWVRQAPGKGLEWVSSISGSGDYIYYADSVKGRFTISRDISKNTLYLQMNSLRAEDTAVYYCAKEGTGANSSLADYRGQGTLVTVSSGTGGGGSGGGGSGGGGSEFEIVLTQSPATLSLSPGERATLSCRASQSVSSYLAWYQQKPGQAPRLLIYDASNRATGIPARFSGSGSGTDFTLTISSLEPEDFAVYYCQQRSNWPITFGQGTRLEIKLEDLKNVFPPEVAVFEPSEAEISHTQKATLVCLATGFYPDHVELSWWVNGKEVHSGVCTDPQPLKEQPALNDSRYCLSSRLRVSATFWQNPRNHFRCQVQFYGLSENDEWTQDRAKPVTQIVSAEAWGRADCGFTSESYQQGVLSATILYEILLGKATLYAVLVSALVLMAMVKRKDSRGRAKRSGSGATNFSLLKQAGDVEENPGPTSMDWIWRILFLVGAATGAHSFEEVQLVESGGGLVQPGRSLRLSCAASGFTFNDYAMHWVRQAPGKGLEWVSTISWNSGSIGYADSVKGRFTISRDNAKKSLYLQMNSLRAEDTALYYCAKDIQYGNYYYGMDVWGQGTTVTVSSTRIQNPDPAVYQLRDSKSSDKSVCLFTDFDSQTNVSQSKDSDVYITDKCVLDMRSMDFKSNSAVAWSNKSDFACANAFNNSIIPEDTFFPSPESSCDVKLVEKSFETDTNLNFQNLSVIGFRILLLKVAGFNLLMTLRLWSSRAKRSGSGVKQTLNFDLLKLAGDVESNPGPSRGHMTEYKPTVRLATRDDVPRAVRTLAAAFADYPATRHTVDPDRHIERVTELQELFLTRVGLDIGKVWVADDGAAVAVWTTPESVEAGAVFAEIGPRMAELSGSRLAAQQQMEGLLAPHRPKEPAWFLATVGVSPDHQGKGLGSAVVLPGVEAAERAGVPAFLETSAPRNLPFYERLGFTVTADVEVPEGPRTWCMTRKPGA

SEQ ID NO: 22973 - protein, 1138 aa, Artificial Sequence
  Synthetic Polypeptide
MALPVTALLLPLALLLHAARPACEVQLLESGGGLIQPGGSLRLSCAASGFTFSSHAMTWVRQAPGKGLEWVSAISGSGDYTHYADSVKGRFTISRDNSKNTVYLQMNSLRAEDSAVYYCAKDEDGGSLLGHRGQGTLVTVSSGTGGGGSGGGGSGGGGSEFEIVLTQSPATLSLSPGERATLSCRASQSVSSYLAWYQQKPGQAPRLLIYDASNRATGIPARFSGSGSGTDFTLTISSLEPEDFAVYYCQQRSNWPITFGQGTRLEIKLEGQPKANPTVTLFPPSSEELQANKATLVCLISDFYPGAVTVAWKADGSPVKAGVETTKPSKQSNNKYAASSYLSLTPEQWKSHRSYSCQVTHEGSTVEKTVAPTECSGRADCGFTSESYQQGVLSATILYEILLGKATLYAVLVSALVLMAMVKRKDSRGRAKRSGSGATNFSLLKQAGDVEENPGPTSATMDWIWRILFLVGAATGAHSGPQVQLQESGGGLAQAGGSLRLSCAASGRTFSMGWFRQAPGKEREFVAAITYSGGSPYYASSVRGRFTISRDNAKNTVYLQMNSLKPEDTAVYYCAANPTYGSDWNAENWGQGTQVTVSSGSGGGGSGGGGSGGGGSFEEVQLVESGGGLVQPGRSLRLSCAASGFTFNDYAMHWVRQAPGKGLEWVSTISWNSGSIGYADSVKGRFTISRDNAKKSLYLQMNSLRAEDTALYYCAKDIQYGNYYYGMDVWGQGTTVTVSSTRASTKGPSVFPLAPSSKSTSGGTAALGCLVKDYFPEPVTVSWNSGALTSGVHTFPAVLQSSGLYSLSSVVTVPSSSLGTQTYICNVNHKPSNTKVDKRVEPKSCIPEDTFFPSPESSCDVKLVEKSFETDTNLNFQNLSVIGFRILLLKVAGFNLLMTLRLWSSRAKRSGSGVKQTLNFDLLKLAGDVESNPGPSRGHMTEYKPTVRLATRDDVPRAVRTLAAAFADYPATRHTVDPDRHIERVTELQELFLTRVGLDIGKVWVADDGAAVAVWTTPESVEAGAVFAEIGPRMAELSGSRLAAQQQMEGLLAPHRPKEPAWFLATVGVSPDHQGKGLGSAVVLPGVEAAERAGVPAFLETSAPRNLPFYERLGFTVTADVEVPEGPRTWCMTRKPGA

SEQ ID NO: 22974 - protein, 1133 aa, Artificial Sequence
  Synthetic Polypeptide
MALPVTALLLPLALLLHAARPACEVQLLESGGGLIQPGGSLRLSCAASGFTFSSHAMTWVRQAPGKGLEWVSAISGSGDYTHYADSVKGRFTISRDNSKNTVYLQMNSLRAEDSAVYYCAKDEDGGSLLGHRGQGTLVTVSSGTGGGGSGGGGSGGGGSEFEIVLTQSPATLSLSPGERATLSCRASQSVSSYLAWYQQKPGQAPRLLIYDASNRATGIPARFSGSGSGTDFTLTISSLEPEDFAVYYCQQRSNWPITFGQGTRLEIKLEADVSPKPTIFLPSIAETKLQKAGTYLCLLEKFFPDVIKIHWQEKKSNTILGSQEGNTMKTNDTYMKFSWLTVPEKSLDKEHRCIVRHENNKNGVDQEIIFPPIKTDVITMDPKDNCSKDANDTLLLQLTNTSAYYMYLLLLLKSVVYFAIITCCLLRRTAFCCNGEKSRAKRSGSGATNFSLLKQAGDVEENPGPTSMDWIWRILFLVGAATGAHSGPQVQLQESGGGLAQAGGSLRLSCAASGRTFSMGWFRQAPGKEREFVAAITYSGGSPYYASSVRGRFTISRDNAKNTVYLQMNSLKPEDTAVYYCAANPTYGSDWNAENWGQGTQVTVSSGSGGGGSGGGGSGGGGSFEEVQLVESGGGLVQPGRSLRLSCAASGFTFNDYAMHWVRQAPGKGLEWVSTISWNSGSIGYADSVKGRFTISRDNAKKSLYLQMNSLRAEDTALYYCAKDIQYGNYYYGMDVWGQGTTVTVSSTRPHTKPSVFVMKNGTNVACLVKEFYPKDIRINLVSSKKITEFDPAIVISPSGKYNAVKLGKYEDSNSVTCSVQHDNKTVHSTDFEVKTDSTDHVKPKETENTKQPSKSCHKPKAIVHTEKVNMMSLTVLGLRMLFAKTVAVNFLLTAKLFFLRAKRSGSGVKQTLNFDLLKLAGDVESNPGPSRGHMTEYKPTVRLATRDDVPRAVRTLAAAFADYPATRHTVDPDRHIERVTELQELFLTRVGLDIGKVWVADDGAAVAVWTTPESVEAGAVFAEIGPRMAELSGSRLAAQQQMEGLLAPHRPKEPAWFLATVGVSPDHQGKGLGSAVVLPGVEAAERAGVPAFLETSAPRNLPFYERLGFTVTADVEVPEGPRTWCMTRKPGA

SEQ ID NO: 22975 - protein, 1133 aa, Artificial Sequence
  Synthetic Polypeptide
MALPVTALLLPLALLLHAARPACEVQLLESGGGLIQPGGSLRLSCAASGFTFSSHAMTWVRQAPGKGLEWVSAISGSGDYTHYADSVKGRFTISRDNSKNTVYLQMNSLRAEDSAVYYCAKDEDGGSLLGHRGQGTLVTVSSGTGGGGSGGGGSGGGGSEFDIQMTQSPSSLSASVGDRVTITCKASQDVGIAVAWYQQKPGKVPKLLIYWASTRHTGVPDRFSGSGSGTDFTLTISSLQPEDVATYYCQQYSSYPYTFGQGTKVEIKRLEADVSPKPTIFLPSIAETKLQKAGTYLCLLEKFFPDVIKIHWQEKKSNTILGSQEGNTMKTNDTYMKFSWLTVPEKSLDKEHRCIVRHENNKNGVDQEIIFPPIKTDVITMDPKDNCSKDANDTLLLQLTNTSAYYMYLLLLLKSVVYFAIITCCLLRRTAFCCNGEKSRAKRSGSGATNFSLLKQAGDVEENPGPTSMDWIWRILFLVGAATGAHSGPQVQLQESGGGLAQAGGSLRLSCAASGRTFSMGWFRQAPGKEREFVAAITYSGGSPYYASSVRGRFTISRDNAKNTVYLQMNSLKPEDTAVYYCAANPTYGSDWNAENWGQGTQVTVSSGSGGGGSGGGGSGGGGSFEQVQLQQPGAELVKPGASVKMSCKASGYAFSSYWINWMKQKPGQGLEWIGQIYPGDGDTNYNGKFKGRATLTADTSSSTAYMQLSSLTSEDSAVYFCARSITTVVGCAMDYWGQGTSVTVSSTRPHTKPSVFVMKNGTNVACLVKEFYPKDIRINLVSSKKITEFDPAIVISPSGKYNAVKLGKYEDSNSVTCSVQHDNKTVHSTDFEVKTDSTDHVKPKETENTKQPSKSCHKPKAIVHTEKVNMMSLTVLGLRMLFAKTVAVNFLLTAKLFFLRAKRSGSGVKQTLNFDLLKLAGDVESNPGPSRGHMTEYKPTVRLATRDDVPRAVRTLAAAFADYPATRHTVDPDRHIERVTELQELFLTRVGLDIGKVWVADDGAAVAVWTTPESVEAGAVFAEIGPRMAELSGSRLAAQQQMEGLLAPHRPKEPAWFLATVGVSPDHQGKGLGSAVVLPGVEAAERAGVPAFLETSAPRNLPFYERLGFTVTADVEVPEGPRTWCMTRKPGA

SEQ ID NO: 22976 - protein, 1134 aa, Artificial Sequence; identical to SEQ ID NO: 22950
  Synthetic Polypeptide

SEQ ID NO: 22977 - protein, 995 aa, Artificial Sequence
  Synthetic Polypeptide
MALPVTALLLPLALLLHAARPDIQMTQSPSSLSASVGDRVTITCKASDHINNWLAWYQQKPGQAPKLLIYGATTLETGVPSRFSGSGSGTDYTLTISSLQPEDFATYYCQQSWNTPWTFGQGTKLEIKRLEDLKNVFPPEVAVFEPSEAEISHTQKATLVCLATGFYPDHVELSWWVNGKEVHSGVCTDPQPLKEQPALNDSRYCLSSRLRVSATFWQNPRNHFRCQVQFYGLSENDEWTQDRAKPVTQIVSAEAWGRADCGFTSESYQQGVLSATILYEILLGKATLYAVLVSALVLMAMVKRKDSRGRAKRSGSGATNFSLLKQAGDVEENPGPTSATMDWIWRILFLVGAATGAHSGPEVQLLESGGGLVQPGGSLRLSCAASGSIASIHAMGWFRQAPGKEREFVAVITWSGGITYYADSVKGRFTISRDNSKNTVYLQMNSLRPEDTALYYCAGDKHQSSWYDYWGQGTLVTVSSGSGGGGSGGGGSGGGGSFEQVQLQQPGAELVKPGASVKMSCKASGYAFSSYWINWMKQKPGQGLEWIGQIYPGDGDTNYNGKFKGRATLTADTSSSTAYMQLSSLTSEDSAVYFCARSITTVVGCAMDYWGQGTSVTVSSTRIQNPDPAVYQLRDSKSSDKSVCLFTDFDSQTNVSQSKDSDVYITDKCVLDMRSMDFKSNSAVAWSNKSDFACANAFNNSIIPEDTFFPSPESSCDVKLVEKSFETDTNLNFQNLSVIGFRILLLKVAGFNLLMTLRLWSSRAKRSGSGVKQTLNFDLLKLAGDVESNPGPSRGHMTEYKPTVRLATRDDVPRAVRTLAAAFADYPATRHTVDPDRHIERVTELQELFLTRVGLDIGKVWVADDGAAVAVWTTPESVEAGAVFAEIGPRMAELSGSRLAAQQQMEGLLAPHRPKEPAWFLATVGVSPDHQGKGLGSAVVLPGVEAAERAGVPAFLETSAPRNLPFYERLGFTVTADVEVPEGPRTWCMTRKPGA

SEQ ID NO: 22978 - protein, 1146 aa, Artificial Sequence
  Synthetic Polypeptide
MALPVTALLLPLALLLHAARPACEVQLVESGGGLVQPGNSLRLSCAASGFTFSSFGMSWVRQAPGKGLEWVSSISGSGSDTLYADSVKGRFTISRDNAKTTLYLQMNSLRPEDTAVYYCTIGGSLSRSSQGTLVTVSSGTGAIGFLRTAGALRRLLGLFGGRAARVLGLETEFDIQMTQSPSSLSASVGDRVTITCKASDHINNWLAWYQQKPGQAPKLLIYGATTLETGVPSRFSGSGSGTDYTLTISSLQPEDFATYYCQQSWNTPWTFGQGTKLEIKRLEDLKNVFPPEVAVFEPSEAEISHTQKATLVCLATGFYPDHVELSWWVNGKEVHSGVCTDPQPLKEQPALNDSRYCLSSRLRVSATFWQNPRNHFRCQVQFYGLSENDEWTQDRAKPVTQIVSAEAWGRADCGFTSESYQQGVLSATILYEILLGKATLYAVLVSALVLMAMVKRKDSRGRAKRSGSGATNFSLLKQAGDVEENPGPTSATMDWIWRILFLVGAATGAHSGPEVQLVESGGGLVQAGGSLRLSCAASGRTFSMGWFRQAPGKEREFVAAITYSGGSPYYADSVKGRFTISRDNAKNTVYLQMNSLKPEDTAVYYCAANPTYGSDWNAENWGQGTQVTVSSGSGGGGSGGGGSGGGGSFEQVQLQQPGAELVKPGASVKMSCKASGYAFSSYWINWMKQKPGQGLEWIGQIYPGDGDTNYNGKFKGRATLTADTSSSTAYMQLSSLTSEDSAVYFCARSITTVVGCAMDYWGQGTSVTVSSTRIQNPDPAVYQLRDSKSSDKSVCLFTDFDSQTNVSQSKDSDVYITDKCVLDMRSMDFKSNSAVAWSNKSDFACANAFNNSIIPEDTFFPSPESSCDVKLVEKSFETDTNLNFQNLSVIGFRILLLKVAGFNLLMTLRLWSSRAKRSGSGVKQTLNFDLLKLAGDVESNPGPSRGHMTEYKPTVRLATRDDVPRAVRTLAAAFADYPATRHTVDPDRHIERVTELQELFLTRVGLDIGKVWVADDGAAVAVWTTPESVEAGAVFAEIGPRMAELSGSRLAAQQQMEGLLAPHRPKEPAWFLATVGVSPDHQGKGLGSAVVLPGVEAAERAGVPAFLETSAPRNLPFYERLGFTVTADVEVPEGPRTWCMTRKPGA

SEQ ID NO: 22979 - protein, 991 aa, Artificial Sequence
  Synthetic Polypeptide
MALPVTALLLPLALLLHAARPDIQMTQSPSSLSASVGDRVTITCKASDHINNWLAWYQQKPGQAPKLLIYGATTLETGVPSRFSGSGSGTDYTLTISSLQPEDFATYYCQQSWNTPWTFGQGTKLEIKRLEDLKNVFPPEVAVFEPSEAEISHTQKATLVCLATGFYPDHVELSWWVNGKEVHSGVCTDPQPLKEQPALNDSRYCLSSRLRVSATFWQNPRNHFRCQVQFYGLSENDEWTQDRAKPVTQIVSAEAWGRADCGFTSESYQQGVLSATILYEILLGKATLYAVLVSALVLMAMVKRKDSRGRAKRSGSGATNFSLLKQAGDVEENPGPTSATMDWIWRILFLVGAATGAHSGPEVQLVESGGGLVQAGGSLRLSCAASGSVFSGNVMGWYRQAPGKEREWVAAIASGGSIYYRDSVKGRFTISRDNAKNTVYLQMNSLKPEDTAVYYCNSHPPTLPYWGLGTQVTVSSGSGGGGSGGGGSGGGGSFEQVQLQQPGAELVKPGASVKMSCKASGYAFSSYWINWMKQKPGQGLEWIGQIYPGDGDTNYNGKFKGRATLTADTSSSTAYMQLSSLTSEDSAVYFCARSITTVVGCAMDYWGQGTSVTVSSTRIQNPDPAVYQLRDSKSSDKSVCLFTDFDSQTNVSQSKDSDVYITDKCVLDMRSMDFKSNSAVAWSNKSDFACANAFNNSIIPEDTFFPSPESSCDVKLVEKSFETDTNLNFQNLSVIGFRILLLKVAGFNLLMTLRLWSSRAKRSGSGVKQTLNFDLLKLAGDVESNPGPSRGHMTEYKPTVRLATRDDVPRAVRTLAAAFADYPATRHTVDPDRHIERVTELQELFLTRVGLDIGKVWVADDGAAVAVWTTPESVEAGAVFAEIGPRMAELSGSRLAAQQQMEGLLAPHRPKEPAWFLATVGVSPDHQGKGLGSAVVLPGVEAAERAGVPAFLETSAPRNLPFYERLGFTVTADVEVPEGPRTWCMTRKPGA

SEQ ID NO: 22980 - protein, 1134 aa, Artificial Sequence; identical to SEQ ID NO: 22950
  Synthetic Polypeptide

SEQ ID NO: 22981 - protein, 1134 aa, Artificial Sequence
  Synthetic Polypeptide
MALPVTALLLPLALLLHAARPEVQLQESGGGLVQPGGSLRLSCAASGRTFSSLFMGWFRQAPGKERELVAAISRYSLYTYYADSVKGRFTISADNAKNAVYLQMNSLKPEDTAVYYCASKLEYTSNDYDSWGQGTQVTVSSGTGGGGSGGGGSGGGGSEFDIQMTQSPSSLSASVGDRVTITCKASDHINNWLAWYQQKPGQAPKLLIYGATTLETGVPSRFSGSGSGTDYTLTISSLQPEDFATYYCQQSWNTPWTFGQGTKLEIKRLEIQNPDPAVYQLRDSKSSDKSVCLFTDFDSQTNVSQSKDSDVYITDKCVLDMRSMDFKSNSAVAWSNKSDFACANAFNNSIIPEDTFFPSSDVPCDVKLVEKSFETDTNLNFQNLSVIGFRILLLKVAGFNLLMTLRLWSSRAKRSGSGVKQTLNFDLLKLAGDVESNPGPTSATMDWIWRILFLVGAATGAHSGPQVQLQESGGGLAQAGGSLRLSCAASGRTFSMGWFRQAPGKEREFVAAITYSGGSPYYASSVRGRFTISRDNAKNTVYLQMNSLKPEDTAVYYCAANPTYGSDWNAENWGQGTQVTVSSGSGGGGSGGGGSGGGGSFEQVQLQQPGAELVKPGASVKMSCKASGYAFSSYWINWMKQKPGQGLEWIGQIYPGDGDTNYNGKFKGRATLTADTSSSTAYMQLSSLTSEDSAVYFCARSITTVVGCAMDYWGQGTSVTVSSTREDLKNVFPPEVAVFEPSKAEIAHTQKATLVCLATGFYPDHVELSWWVNGKEVHSGVCTDPQPLKEQPALNDSRYCLSSRLRVSATFWQNPRNHFRCQVQFYGLSENDEWTQDRAKPVTQIVSAEAWGRADCGITSASYHQGVLSATILYEILLGKATLYAVLVSALVLMAMVKRKDSRGRAKRSGSGATNFSLLKQAGDVEENPGPSRGHMTEYKPTVRLATRDDVPRAVRTLAAAFADYPATRHTVDPDRHIERVTELQELFLTRVGLDIGKVWVADDGAAVAVWTTPESVEAGAVFAEIGPRMAELSGSRLAAQQQMEGLLAPHRPKEPAWFLATVGVSPDHQGKGLGSAVVLPGVEAAERAGVPAFLETSAPRNLPFYERLGFTVTADVEVPEGPRTWCMTRKPGA

SEQ ID NO: 22982 - protein, 1134 aa, Artificial Sequence
  Synthetic Polypeptide
MALPVTALLLPLALLLHAARPEVQLQESGGGLVQPGGSLRLSCAASGRTFSSLFMGWVRQAPGKGLELVSAISRYSLYTYYADSVKGRFTISRDNAKNTLYLQMNSLRPEDTAVYYCASKLEYTSNDYDSWGQGTLVTVSSGTGGGGSGGGGSGGGGSEFDIQMTQSPSSLSASVGDRVTITCKASDHINNWLAWYQQKPGQAPKLLIYGATTLETGVPSRFSGSGSGTDYTLTISSLQPEDFATYYCQQSWNTPWTFGQGTKLEIKRLEIQNPDPAVYQLRDSKSSDKSVCLFTDFDSQTNVSQSKDSDVYITDKCVLDMRSMDFKSNSAVAWSNKSDFACANAFNNSIIPEDTFFPSSDVPCDVKLVEKSFETDTNLNFQNLSVIGFRILLLKVAGFNLLMTLRLWSSRAKRSGSGVKQTLNFDLLKLAGDVESNPGPTSATMDWIWRILFLVGAATGAHSGPQVQLQESGGGLAQAGGSLRLSCAASGRTFSMGWFRQAPGKEREFVAAITYSGGSPYYASSVRGRFTISRDNAKNTVYLQMNSLKPEDTAVYYCAANPTYGSDWNAENWGQGTQVTVSSGSGGGGSGGGGSGGGGSFEQVQLQQPGAELVKPGASVKMSCKASGYAFSSYWINWMKQKPGQGLEWIGQIYPGDGDTNYNGKFKGRATLTADTSSSTAYMQLSSLTSEDSAVYFCARSITTVVGCAMDYWGQGTSVTVSSTREDLKNVFPPEVAVFEPSKAEIAHTQKATLVCLATGFYPDHVELSWWVNGKEVHSGVCTDPQPLKEQPALNDSRYCLSSRLRVSATFWQNPRNHFRCQVQFYGLSENDEWTQDRAKPVTQIVSAEAWGRADCGITSASYHQGVLSATILYEILLGKATLYAVLVSALVLMAMVKRKDSRGRAKRSGSGATNFSLLKQAGDVEENPGPSRGHMTEYKPTVRLATRDDVPRAVRTLAAAFADYPATRHTVDPDRHIERVTELQELFLTRVGLDIGKVWVADDGAAVAVWTTPESVEAGAVFAEIGPRMAELSGSRLAAQQQMEGLLAPHRPKEPAWFLATVGVSPDHQGKGLGSAVVLPGVEAAERAGVPAFLETSAPRNLPFYERLGFTVTADVEVPEGPRTWCMTRKPGA

SEQ ID NO: 22983 - protein, 1142 aa, Artificial Sequence
  Synthetic Polypeptide
MALPVTALLLPLALLLHAARPEVQLVESGGGLVQPGGSLRLSCEASGFASDDYIIGWFRQAPGKEREGVSCISSKYANTVYTDSVKGRFRLSRGTAKNTVYLQMSALKPEDTAVYYCAMDSRRVTCPEISTMHRNFDSWGQGTLVTVSSGTGGGGSGGGGSGGGGSEFDIQMTQSPSSLSASVGDRVTITCKASDHINNWLAWYQQKPGQAPKLLIYGATTLETGVPSRFSGSGSGTDYTLTISSLQPEDFATYYCQQSWNTPWTFGQGTKLEIKRLEIQNPDPAVYQLRDSKSSDKSVCLFTDFDSQTNVSQSKDSDVYITDKCVLDMRSMDFKSNSAVAWSNKSDFACANAFNNSIIPEDTFFPSSDVPCDVKLVEKSFETDTNLNFQNLSVIGFRILLLKVAGFNLLMTLRLWSSRAKRSGSGVKQTLNFDLLKLAGDVESNPGPTSATMDWIWRILFLVGAATGAHSGPQVQLQESGGGLAQAGGSLRLSCAASGRTFSMGWFRQAPGKEREFVAAITYSGGSPYYASSVRGRFTISRDNAKNTVYLQMNSLKPEDTAVYYCAANPTYGSDWNAENWGQGTQVTVSSGSGGGGSGGGGSGGGGSFEQVQLQQPGAELVKPGASVKMSCKASGYAFSSYWINWMKQKPGQGLEWIGQIYPGDGDTNYNGKFKGRATLTADTSSSTAYMQLSSLTSEDSAVYFCARSITTVVGCAMDYWGQGTSVTVSSTREDLKNVFPPEVAVFEPSKAEIAHTQKATLVCLATGFYPDHVELSWWVNGKEVHSGVCTDPQPLKEQPALNDSRYCLSSRLRVSATFWQNPRNHFRCQVQFYGLSENDEWTQDRAKPVTQIVSAEAWGRADCGITSASYHQGVLSATILYEILLGKATLYAVLVSALVLMAMVKRKDSRGRAKRSGSGATNFSLLKQAGDVEENPGPSRGHMTEYKPTVRLATRDDVPRAVRTLAAAFADYPATRHTVDPDRHIERVTELQELFLTRVGLDIGKVWVADDGAAVAVWTTPESVEAGAVFAEIGPRMAELSGSRLAAQQQMEGLLAPHRPKEPAWFLATVGVSPDHQGKGLGSAVVLPGVEAAERAGVPAFLETSAPRNLPFYERLGFTVTADVEVPEGPRTWCMTRKPGA

SEQ ID NO: 22984 - protein, 1142 aa, Artificial Sequence
  Synthetic Polypeptide
MALPVTALLLPLALLLHAARPEVQLVESGGGLVQPGGSLRLSCAASGFASDYYIIGWFRQAPGKEREGVSCISSRYANTNYADSVKGRFTISRDNAKNTVYLQMNSLKPEDTAVYYCAADTRRYTCPDIATMHRNFDSWGQGTLVTVSSGTGGGGSGGGGSGGGGSEFDIQMTQSPSSLSASVGDRVTITCKASDHINNWLAWYQQKPGQAPKLLIYGATTLETGVPSRFSGSGSGTDYTLTISSLQPEDFATYYCQQSWNTPWTFGQGTKLEIKRLEIQNPDPAVYQLRDSKSSDKSVCLFTDFDSQTNVSQSKDSDVYITDKCVLDMRSMDFKSNSAVAWSNKSDFACANAFNNSIIPEDTFFPSSDVPCDVKLVEKSFETDTNLNFQNLSVIGFRILLLKVAGFNLLMTLRLWSSRAKRSGSGVKQTLNFDLLKLAGDVESNPGPTSATMDWIWRILFLVGAATGAHSGPQVQLQESGGGLAQAGGSLRLSCAASGRTFSMGWFRQAPGKEREFVAAITYSGGSPYYASSVRGRFTISRDNAKNTVYLQMNSLKPEDTAVYYCAANPTYGSDWNAENWGQGTQVTVSSGSGGGGSGGGGSGGGGSFEQVQLQQPGAELVKPGASVKMSCKASGYAFSSYWINWMKQKPGQGLEWIGQIYPGDGDTNYNGKFKGRATLTADTSSSTAYMQLSSLTSEDSAVYFCARSITTVVGCAMDYWGQGTSVTVSSTREDLKNVFPPEVAVFEPSKAEIAHTQKATLVCLATGFYPDHVELSWWVNGKEVHSGVCTDPQPLKEQPALNDSRYCLSSRLRVSATFWQNPRNHFRCQVQFYGLSENDEWTQDRAKPVTQIVSAEAWGRADCGITSASYHQGVLSATILYEILLGKATLYAVLVSALVLMAMVKRKDSRGRAKRSGSGATNFSLLKQAGDVEENPGPSRGHMTEYKPTVRLATRDDVPRAVRTLAAAFADYPATRHTVDPDRHIERVTELQELFLTRVGLDIGKVWVADDGAAVAVWTTPESVEAGAVFAEIGPRMAELSGSRLAAQQQMEGLLAPHRPKEPAWFLATVGVSPDHQGKGLGSAVVLPGVEAAERAGVPAFLETSAPRNLPFYERLGFTVTADVEVPEGPRTWCMTRKPGA

SEQ ID NO: 22985 - protein, 1068 aa, Artificial Sequence
  Synthetic Polypeptide
MALPVTALLLPLALLLHAARPDIQMTQSPSSLSASVGDRVTITCKASDHINNWLAWYQQKPGQAPKLLIYGATTLETGVPSRFSGSGSGTDYTLTISSLQPEDFATYYCQQSWNTPWTFGQGTKLEIKRLEDLKNVFPPEVAVFEPSEAEISHTQKATLVCLATGFYPDHVELSWWVNGKEVHSGVCTDPQPLKEQPALNDSRYCLSSRLRVSATFWQNPRNHFRCQVQFYGLSENDEWTQDRAKPVTQIVSAEAWGRADCGFTSESYQQGVLSATILYEILLGKATLYAVLVSALVLMAMVKRKDSRGRAKRSGSGATNFSLLKQAGDVEENPGPTSATMDWIWRILFLVGAATGAHSGPGMRTEDLPKAVVFLEPQWYRVLEKDSVTLKCQGAYSPEDNSTQWFHNESLISSQASSYFIDAATVDDSGEYRCQTNLSTLSDPVQLEVHIGWLLLQAPRWVFKEEDPIHLRCHSWKNTALHKVTYLQNGKGRKYFHHNSDFYIPKATLKDSGSYFCRGLVGSKNVSSETVNITITQGLAVSTISSFFPPGYQGSGGGGSGGGGSGGGGSFEQVQLQQPGAELVKPGASVKMSCKASGYAFSSYWINWMKQKPGQGLEWIGQIYPGDGDTNYNGKFKGRATLTADTSSSTAYMQLSSLTSEDSAVYFCARSITTVVGCAMDYWGQGTSVTVSSTRIQNPDPAVYQLRDSKSSDKSVCLFTDFDSQTNVSQSKDSDVYITDKCVLDMRSMDFKSNSAVAWSNKSDFACANAFNNSIIPEDTFFPSPESSCDVKLVEKSFETDTNLNFQNLSVIGFRILLLKVAGFNLLMTLRLWSSRAKRSGSGVKQTLNFDLLKLAGDVESNPGPSRGHMTEYKPTVRLATRDDVPRAVRTLAAAFADYPATRHTVDPDRHIERVTELQELFLTRVGLDIGKVWVADDGAAVAVWTTPESVEAGAVFAEIGPRMAELSGSRLAAQQQMEGLLAPHRPKEPAWFLATVGVSPDHQGKGLGSAVVLPGVEAAERAGVPAFLETSAPRNLPFYERLGFTVTADVEVPEGPRTWCMTRKPGA

SEQ ID NO: 22986 - protein, 1205 aa, Artificial Sequence
  Synthetic Polypeptide
MALPVTALLLPLALLLHAARPGMRTEDLPKAVVFLEPQWYRVLEKDSVTLKCQGAYSPEDNSTQWFHNESLISSQASSYFIDAATVDDSGEYRCQTNLSTLSDPVQLEVHIGWLLLQAPRWVFKEEDPIHLRCHSWKNTALHKVTYLQNGKGRKYFHHNSDFYIPKATLKDSGSYFCRGLVGSKNVSSETVNITITQGLAVSTISSFFPPGYQGTGGGGSGGGGSGGGGSEFDIQMTQSPSSLSASVGDRVTITCKASDHINNWLAWYQQKPGQAPKLLIYGATTLETGVPSRFSGSGSGTDYTLTISSLQPEDFATYYCQQSWNTPWTFGQGTKLEIKRLEDLKNVFPPEVAVFEPSKAEIAHTQKATLVCLATGFYPDHVELSWWVNGKEVHSGVCTDPQPLKEQPALNDSRYCLSSRLRVSATFWQNPRNHFRCQVQFYGLSENDEWTQDRAKPVTQIVSAEAWGRADCGITSASYHQGVLSATILYEILLGKATLYAVLVSALVLMAMVKRKDSRGRAKRSGSGATNFSLLKQAGDVEENPGPTSATMDWIWRILFLVGAATGAHSGPQVQLQESGGGLAQAGGSLRLSCAASGRTFSMGWFRQAPGKEREFVAAITYSGGSPYYASSVRGRFTISRDNAKNTVYLQMNSLKPEDTAVYYCAANPTYGSDWNAENWGQGTQVTVSSGSGGGGSGGGGSGGGGSFEQVQLQQPGAELVKPGASVKMSCKASGYAFSSYWINWMKQKPGQGLEWIGQIYPGDGDTNYNGKFKGRATLTADTSSSTAYMQLSSLTSEDSAVYFCARSITTVVGCAMDYWGQGTSVTVSSTRIQNPDPAVYQLRDSKSSDKSVCLFTDFDSQTNVSQSKDSDVYITDKCVLDMRSMDFKSNSAVAWSNKSDFACANAFNNSIIPEDTFFPSSDVPCDVKLVEKSFETDTNLNFQNLSVIGFRILLLKVAGFNLLMTLRLWSSRAKRSGSGVKQTLNFDLLKLAGDVESNPGPSRGHMTEYKPTVRLATRDDVPRAVRTLAAAFADYPATRHTVDPDRHIERVTELQELFLTRVGLDIGKVWVADDGAAVAVWTTPESVEAGAVFAEIGPRMAELSGSRLAAQQQMEGLLAPHRPKEPAWFLATVGVSPDHQGKGLGSAVVLPGVEAAERAGVPAFLETSAPRNLPFYERLGFTVTADVEVPEGPRTWCMTRKPGA

SEQ ID NO: 22987 - protein, 1066 aa, Artificial Sequence
  Synthetic Polypeptide
MALPVTALLLPLALLLHAARPGMRTEDLPKAVVFLEPQWYRVLEKDSVTLKCQGAYSPEDNSTQWFHNESLISSQASSYFIDAATVDDSGEYRCQTNLSTLSDPVQLEVHIGWLLLQAPRWVFKEEDPIHLRCHSWKNTALHKVTYLQNGKGRKYFHHNSDFYIPKATLKDSGSYFCRGLVGSKNVSSETVNITITQGLAVSTISSFFPPGYQGTGGGGSGGGGSGGGGSEFDIQMTQSPSSLSASVGDRVTITCKASDHINNWLAWYQQKPGQAPKLLIYGATTLETGVPSRFSGSGSGTDYTLTISSLQPEDFATYYCQQSWNTPWTFGQGTKLEIKRLEDLKNVFPPEVAVFEPSEAEISHTQKATLVCLATGFYPDHVELSWWVNGKEVHSGVCTDPQPLKEQPALNDSRYCLSSRLRVSATFWQNPRNHFRCQVQFYGLSENDEWTQDRAKPVTQIVSAEAWGRADCGFTSESYQQGVLSATILYEILLGKATLYAVLVSALVLMAMVKRKDSRGRAKRSGSGATNFSLLKQAGDVEENPGPTSMDWIWRILFLVGAATGAHSFEQVQLQQPGAELVKPGASVKMSCKASGYAFSSYWINWMKQKPGQGLEWIGQIYPGDGDTNYNGKFKGRATLTADTSSSTAYMQLSSLTSEDSAVYFCARSITTVVGCAMDYWGQGTSVTVSSTRIQNPDPAVYQLRDSKSSDKSVCLFTDFDSQTNVSQSKDSDVYITDKCVLDMRSMDFKSNSAVAWSNKSDFACANAFNNSIIPEDTFFPSPESSCDVKLVEKSFETDTNLNFQNLSVIGFRILLLKVAGFNLLMTLRLWSSRAKRSGSGVKQTLNFDLLKLAGDVESNPGPSRGHMTEYKPTVRLATRDDVPRAVRTLAAAFADYPATRHTVDPDRHIERVTELQELFLTRVGLDIGKVWVADDGAAVAVWTTPESVEAGAVFAEIGPRMAELSGSRLAAQQQMEGLLAPHRPKEPAWFLATVGVSPDHQGKGLGSAVVLPGVEAAERAGVPAFLETSAPRNLPFYERLGFTVTADVEVPEGPRTWCMTRKPGA

SEQ ID NO: 22988 - protein, 1205 aa, Artificial Sequence
  Synthetic Polypeptide
MALPVTALLLPLALLLHAARPGMRTEDLPKAVVFLEPQWYRVLEKDSVTLKCQGAYSPEDNSTQWFHNESLISSQASSYFIDAATVDDSGEYRCQTNLSTLSDPVQLEVHIGWLLLQAPRWVFKEEDPIHLRCHSWKNTALHKVTYLQNGKGRKYFHHNSDFYIPKATLKDSGSYFCRGLVGSKNVSSETVNITITQGLAVSTISSFFPPGYQGTGGGGSGGGGSGGGGSEFDIQMTQSPSSLSASVGDRVTITCRASQDISNYLNWYQQKPGKAVKLLIYYTSILHSGVPSRFSGSGSGTDYTLTISSLQPEDFATYFCQQGNTLPWTFGGGTKVEIKLEDLKNVFPPEVAVFEPSKAEIAHTQKATLVCLATGFYPDHVELSWWVNGKEVHSGVCTDPQPLKEQPALNDSRYCLSSRLRVSATFWQNPRNHFRCQVQFYGLSENDEWTQDRAKPVTQIVSAEAWGRADCGITSASYHQGVLSATILYEILLGKATLYAVLVSALVLMAMVKRKDSRGRAKRSGSGATNFSLLKQAGDVEENPGPTSATMDWIWRILFLVGAATGAHSGPQVQLQESGGGLAQAGGSLRLSCAASGRTFSMGWFRQAPGKEREFVAAITYSGGSPYYASSVRGRFTISRDNAKNTVYLQMNSLKPEDTAVYYCAANPTYGSDWNAENWGQGTQVTVSSGSGGGGSGGGGSGGGGSFEVQLVESGGGLVKPGGSLKLSCAASGFAFSIYDMSWVRQAPGKGLEWVAYISSGGGTTYYPDTVKGRFTISRDNAKNTLYLQMSSLRAEDTAMYYCARHSGYGSSYGVLFAYWGQGTLVTVSSTRIQNPDPAVYQLRDSKSSDKSVCLFTDFDSQTNVSQSKDSDVYITDKCVLDMRSMDFKSNSAVAWSNKSDFACANAFNNSIIPEDTFFPSSDVPCDVKLVEKSFETDTNLNFQNLSVIGFRILLLKVAGFNLLMTLRLWSSRAKRSGSGVKQTLNFDLLKLAGDVESNPGPSRGHMTEYKPTVRLATRDDVPRAVRTLAAAFADYPATRHTVDPDRHIERVTELQELFLTRVGLDIGKVWVADDGAAVAVWTTPESVEAGAVFAEIGPRMAELSGSRLAAQQQMEGLLAPHRPKEPAWFLATVGVSPDHQGKGLGSAVVLPGVEAAERAGVPAFLETSAPRNLPFYERLGFTVTADVEVPEGPRTWCMTRKPGA

SEQ ID NO: 22989 - protein, 1208 aa, Artificial Sequence
  Synthetic Polypeptide
MALPVTALLLPLALLLHAARPACEVQLLESGGGLIQPGGSLRLSCAASGFTFSSHAMTWVRQAPGKGLEWVSAISGSGDYTHYADSVKGRFTISRDNSKNTVYLQMNSLRAEDSAVYYCAKDEDGGSLLGHRGQGTLVTVSSGTGGGGSGGGGSGGGGSEFDIQMTQSPSSLSASVGDRVTITCKASDHINNWLAWYQQKPGQAPKLLIYGATTLETGVPSRFSGSGSGTDYTLTISSLQPEDFATYYCQQSWNTPWTFGQGTKLEIKRLEDLKNVFPPEVAVFEPSEAEISHTQKATLVCLATGFYPDHVELSWWVNGKEVHSGVCTDPQPLKEQPALNDSRYCLSSRLRVSATFWQNPRNHFRCQVQFYGLSENDEWTQDRAKPVTQIVSAEAWGRADCGFTSESYQQGVLSATILYEILLGKATLYAVLVSALVLMAMVKRKDSRGRAKRSGSGATNFSLLKQAGDVEENPGPTSATMDWIWRILFLVGAATGAHSGPGMRTEDLPKAVVFLEPQWYRVLEKDSVTLKCQGAYSPEDNSTQWFHNESLISSQASSYFIDAATVDDSGEYRCQTNLSTLSDPVQLEVHIGWLLLQAPRWVFKEEDPIHLRCHSWKNTALHKVTYLQNGKGRKYFHHNSDFYIPKATLKDSGSYFCRGLVGSKNVSSETVNITITQGLAVSTISSFFPPGYQGSGGGGSGGGGSGGGGSFEQVQLQQPGAELVKPGASVKMSCKASGYAFSSYWINWMKQKPGQGLEWIGQIYPGDGDTNYNGKFKGRATLTADTSSSTAYMQLSSLTSEDSAVYFCARSITTVVGCAMDYWGQGTSVTVSSTRIQNPDPAVYQLRDSKSSDKSVCLFTDFDSQTNVSQSKDSDVYITDKCVLDMRSMDFKSNSAVAWSNKSDFACANAFNNSIIPEDTFFPSPESSCDVKLVEKSFETDTNLNFQNLSVIGFRILLLKVAGFNLLMTLRLWSSRAKRSGSGVKQTLNFDLLKLAGDVESNPGPSRGHMTEYKPTVRLATRDDVPRAVRTLAAAFADYPATRHTVDPDRHIERVTELQELFLTRVGLDIGKVWVADDGAAVAVWTTPESVEAGAVFAEIGPRMAELSGSRLAAQQQMEGLLAPHRPKEPAWFLATVGVSPDHQGKGLGSAVVLPGVEAAERAGVPAFLETSAPRNLPFYERLGFTVTADVEVPEGPRTWCMTRKPGA

SEQ ID NO: 22990 - protein, 1205 aa, Artificial Sequence
  Synthetic Polypeptide
MALPVTALLLPLALLLHAARPEVQLVESGGGLVQAGGSLRLSCAASGRTFSMGWFRQAPGKEREFVAAITYSGGSPYYADSVKGRFTISRDNAKNTVYLQMNSLKPEDTAVYYCAANPTYGSDWNAENWGQGTQVTVSSGTGGGGSGGGGSGGGGSEFDIQMTQSPSSLSASVGDRVTITCKASDHINNWLAWYQQKPGQAPKLLIYGATTLETGVPSRFSGSGSGTDYTLTISSLQPEDFATYYCQQSWNTPWTFGQGTKLEIKRLEDLKNVFPPEVAVFEPSEAEISHTQKATLVCLATGFYPDHVELSWWVNGKEVHSGVCTDPQPLKEQPALNDSRYCLSSRLRVSATFWQNPRNHFRCQVQFYGLSENDEWTQDRAKPVTQIVSAEAWGRADCGFTSESYQQGVLSATILYEILLGKATLYAVLVSALVLMAMVKRKDSRGRAKRSGSGATNFSLLKQAGDVEENPGPTSATMDWIWRILFLVGAATGAHSGPGMRTEDLPKAVVFLEPQWYRVLEKDSVTLKCQGAYSPEDNSTQWFHNESLISSQASSYFIDAATVDDSGEYRCQTNLSTLSDPVQLEVHIGWLLLQAPRWVFKEEDPIHLRCHSWKNTALHKVTYLQNGKGRKYFHHNSDFYIPKATLKDSGSYFCRGLVGSKNVSSETVNITITQGLAVSTISSFFPPGYQGSGGGGSGGGGSGGGGSFEQVQLQQPGAELVKPGASVKMSCKASGYAFSSYWINWMKQKPGQGLEWIGQIYPGDGDTNYNGKFKGRATLTADTSSSTAYMQLSSLTSEDSAVYFCARSITTVVGCAMDYWGQGTSVTVSSTRIQNPDPAVYQLRDSKSSDKSVCLFTDFDSQTNVSQSKDSDVYITDKCVLDMRSMDFKSNSAVAWSNKSDFACANAFNNSIIPEDTFFPSPESSCDVKLVEKSFETDTNLNFQNLSVIGFRILLLKVAGFNLLMTLRLWSSRAKRSGSGVKQTLNFDLLKLAGDVESNPGPSRGHMTEYKPTVRLATRDDVPRAVRTLAAAFADYPATRHTVDPDRHIERVTELQELFLTRVGLDIGKVWVADDGAAVAVWTTPESVEAGAVFAEIGPRMAELSGSRLAAQQQMEGLLAPHRPKEPAWFLATVGVSPDHQGKGLGSAVVLPGVEAAERAGVPAFLETSAPRNLPFYERLGFTVTADVEVPEGPRTWCMTRKPGA

SEQ ID NO: 22991 - protein, 1205 aa, Artificial Sequence
  Synthetic Polypeptide
MALPVTALLLPLALLLHAARPGMRTEDLPKAVVFLEPQWYRVLEKDSVTLKCQGAYSPEDNSTQWFHNESLISSQASSYFIDAATVDDSGEYRCQTNLSTLSDPVQLEVHIGWLLLQAPRWVFKEEDPIHLRCHSWKNTALHKVTYLQNGKGRKYFHHNSDFYIPKATLKDSGSYFCRGLVGSKNVSSETVNITITQGLAVSTISSFFPPGYQGTGGGGSGGGGSGGGGSEFEIVLTQSPATLSLSPGERATLSCRASQSVSSYLAWYQQKPGQAPRLLIYDASNRATGIPARFSGSGSGTDFTLTISSLEPEDFAVYYCQQRSNWPITFGQGTRLEIKLEDLKNVFPPEVAVFEPSKAEIAHTQKATLVCLATGFYPDHVELSWWVNGKEVHSGVCTDPQPLKEQPALNDSRYCLSSRLRVSATFWQNPRNHFRCQVQFYGLSENDEWTQDRAKPVTQIVSAEAWGRADCGITSASYHQGVLSATILYEILLGKATLYAVLVSALVLMAMVKRKDSRGRAKRSGSGATNFSLLKQAGDVEENPGPTSATMDWIWRILFLVGAATGAHSGPQVQLQESGGGLAQAGGSLRLSCAASGRTFSMGWFRQAPGKEREFVAAITYSGGSPYYASSVRGRFTISRDNAKNTVYLQMNSLKPEDTAVYYCAANPTYGSDWNAENWGQGTQVTVSSGSGGGGSGGGGSGGGGSFEEVQLVESGGGLVQPGRSLRLSCAASGFTFNDYAMHWVRQAPGKGLEWVSTISWNSGSIGYADSVKGRFTISRDNAKKSLYLQMNSLRAEDTALYYCAKDIQYGNYYYGMDVWGQGTTVTVSSTRIQNPDPAVYQLRDSKSSDKSVCLFTDFDSQTNVSQSKDSDVYITDKCVLDMRSMDFKSNSAVAWSNKSDFACANAFNNSIIPEDTFFPSSDVPCDVKLVEKSFETDTNLNFQNLSVIGFRILLLKVAGFNLLMTLRLWSSRAKRSGSGVKQTLNFDLLKLAGDVESNPGPSRGHMTEYKPTVRLATRDDVPRAVRTLAAAFADYPATRHTVDPDRHIERVTELQELFLTRVGLDIGKVWVADDGAAVAVWTTPESVEAGAVFAEIGPRMAELSGSRLAAQQQMEGLLAPHRPKEPAWFLATVGVSPDHQGKGLGSAVVLPGVEAAERAGVPAFLETSAPRNLPFYERLGFTVTADVEVPEGPRTWCMTRKPGA

SEQ ID NO: 22992 - protein, 1299 aa, Artificial Sequence
  Synthetic Polypeptide
MALPVTALLLPLALLLHAARPLFNQEVQIPLTESYCGPCPKNWICYKNNCYQFFDESKNWYESQASCMSQNASLLKVYSKEDQDLLKLVKSYHWMGLVHIPTNGSWQWEDGSILSPNLLTIIEMQKGDCALYASSFKGYIENCSTPNTYICMQRTVGGGGSGGGGSGGGGSDLFNQEVQIPLTESYCGPCPKNWICYKNNCYQFFDESKNWYESQASCMSQNASLLKVYSKEDQDLLKLVKSYHWMGLVHIPTNGSWQWEDGSILSPNLLTIIEMQKGDCALYASSFKGYIENCSTPNTYICMQRTVGTGGGGSGGGGSGGGGSEFDIQMTQSPSSLSASVGDRVTITCKASDHINNWLAWYQQKPGQAPKLLIYGATTLETGVPSRFSGSGSGTDYTLTISSLQPEDFATYYCQQSWNTPWTFGQGTKLEIKRLEDLKNVFPPEVAVFEPSKAEIAHTQKATLVCLATGFYPDHVELSWWVNGKEVHSGVCTDPQPLKEQPALNDSRYCLSSRLRVSATFWQNPRNHFRCQVQFYGLSENDEWTQDRAKPVTQIVSAEAWGRADCGITSASYHQGVLSATILYEILLGKATLYAVLVSALVLMAMVKRKDSRGRAKRSGSGATNFSLLKQAGDVEENPGPTSATMDWIWRILFLVGAATGAHSGPQVQLQESGGGLAQAGGSLRLSCAASGRTFSMGWFRQAPGKEREFVAAITYSGGSPYYASSVRGRFTISRDNAKNTVYLQMNSLKPEDTAVYYCAANPTYGSDWNAENWGQGTQVTVSSGSGGGGSGGGGSGGGGSFEQVQLQQPGAELVKPGASVKMSCKASGYAFSSYWINWMKQKPGQGLEWIGQIYPGDGDTNYNGKFKGRATLTADTSSSTAYMQLSSLTSEDSAVYFCARSITTVVGCAMDYWGQGTSVTVSSTRIQNPDPAVYQLRDSKSSDKSVCLFTDFDSQTNVSQSKDSDVYITDKCVLDMRSMDFKSNSAVAWSNKSDFACANAFNNSIIPEDTFFPSSDVPCDVKLVEKSFETDTNLNFQNLSVIGFRILLLKVAGFNLLMTLRLWSSRAKRSGSGVKQTLNFDLLKLAGDVESNPGPSRGHMTEYKPTVRLATRDDVPRAVRTLAAAFADYPATRHTVDPDRHIERVTELQELFLTRVGLDIGKVWVADDGAAVAVWTTPESVEAGAVFAEIGPRMAELSGSRLAAQQQMEGLLAPHRPKEPAWFLATVGVSPDHQGKGLGSAVVLPGVEAAERAGVPAFLETSAPRNLPFYERLGFTVTADVEVPEGPRTWCMTRKPGA

SEQ ID NO: 22993 - protein, 1140 aa, Artificial Sequence
  Synthetic Polypeptide
MALPVTALLLPLALLLHAARPEVQLVESGGGVVQPGRSLRLSCAASGFSFSGYGMHWVRQAPGKGLEWVAYISYDGSNKYYADSVKGRFTISRDNSKNTLYLQMNSLRAEDTAVYYCAKDPAWGLRLGESSSYDFDIWGQGTMVTVSSGTGGGGSGGGGSGGGGSEFDIQMTQSPSSLSASVGDRVTITCKASDHINNWLAWYQQKPGQAPKLLIYGATTLETGVPSRFSGSGSGTDYTLTISSLQPEDFATYYCQQSWNTPWTFGQGTKLEIKRLEDLKNVFPPEVAVFEPSKAEIAHTQKATLVCLATGFYPDHVELSWWVNGKEVHSGVCTDPQPLKEQPALNDSRYCLSSRLRVSATFWQNPRNHFRCQVQFYGLSENDEWTQDRAKPVTQIVSAEAWGRADCGITSASYHQGVLSATILYEILLGKATLYAVLVSALVLMAMVKRKDSRGRAKRSGSGATNFSLLKQAGDVEENPGPTSATMDWIWRILFLVGAATGAHSGPQVQLQESGGGLAQAGGSLRLSCAASGRTFSMGWFRQAPGKEREFVAAITYSGGSPYYASSVRGRFTISRDNAKNTVYLQMNSLKPEDTAVYYCAANPTYGSDWNAENWGQGTQVTVSSGSGGGGSGGGGSGGGGSFEQVQLQQPGAELVKPGASVKMSCKASGYAFSSYWINWMKQKPGQGLEWIGQIYPGDGDTNYNGKFKGRATLTADTSSSTAYMQLSSLTSEDSAVYFCARSITTVVGCAMDYWGQGTSVTVSSTRIQNPDPAVYQLRDSKSSDKSVCLFTDFDSQTNVSQSKDSDVYITDKCVLDMRSMDFKSNSAVAWSNKSDFACANAFNNSIIPEDTFFPSSDVPCDVKLVEKSFETDTNLNFQNLSVIGFRILLLKVAGFNLLMTLRLWSSRAKRSGSGVKQTLNFDLLKLAGDVESNPGPSRGHMTEYKPTVRLATRDDVPRAVRTLAAAFADYPATRHTVDPDRHIERVTELQELFLTRVGLDIGKVWVADDGAAVAVWTTPESVEAGAVFAEIGPRMAELSGSRLAAQQQMEGLLAPHRPKEPAWFLATVGVSPDHQGKGLGSAVVLPGVEAAERAGVPAFLETSAPRNLPFYERLGFTVTADVEVPEGPRTWCMTRKPGA

SEQ ID NO: 22994 - protein, 988 aa, Artificial Sequence
  Synthetic Polypeptide
MALPVTALLLPLALLLHAARPDIQMTQSPSSLSASVGDRVTITCKASDHINNWLAWYQQKPGQAPKLLIYGATTLETGVPSRFSGSGSGTDYTLTISSLQPEDFATYYCQQSWNTPWTFGQGTKLEIKRLEIQNPDPAVYQLRDSKSSDKSVCLFTDFDSQTNVSQSKDSDVYITDKCVLDMRSMDFKSNSAVAWSNKSDFACANAFNNSIIPEDTFFPSSDVPCDVKLVEKSFETDTNLNFQNLSVIGFRILLLKVAGFNLLMTLRLWSSRAKRSGSGVKQTLNFDLLKLAGDVESNPGPTSATMDWIWRILFLVGAATGAHSEVQLLESGGGLVQPGGSLRLSCAASGFSFSSYALSWVRQAPGKGLEWVSSIGENDGTTDYADAVKGRFTISRDNSKNTLYLQMNSLRVEDTAVYYCVKDGVHWGQGTLVTVSSGSGGGGSGGGGSGGGGSFEQVQLQQPGAELVKPGASVKMSCKASGYAFSSYWINWMKQKPGQGLEWIGQIYPGDGDTNYNGKFKGRATLTADTSSSTAYMQLSSLTSEDSAVYFCARSITTVVGCAMDYWGQGTSVTVSSTREDLKNVFPPEVAVFEPSKAEIAHTQKATLVCLATGFYPDHVELSWWVNGKEVHSGVCTDPQPLKEQPALNDSRYCLSSRLRVSATFWQNPRNHFRCQVQFYGLSENDEWTQDRAKPVTQIVSAEAWGRADCGITSASYHQGVLSATILYEILLGKATLYAVLVSALVLMAMVKRKDSRGRAKRSGSGATNFSLLKQAGDVEENPGPSRGHMTEYKPTVRLATRDDVPRAVRTLAAAFADYPATRHTVDPDRHIERVTELQELFLTRVGLDIGKVWVADDGAAVAVWTTPESVEAGAVFAEIGPRMAELSGSRLAAQQQMEGLLAPHRPKEPAWFLATVGVSPDHQGKGLGSAVVLPGVEAAERAGVPAFLETSAPRNLPFYERLGFTVTADVEVPEGPRTWCMTRKPGA

SEQ ID NO: 22995 - protein, 987 aa, Artificial Sequence
  Synthetic Polypeptide
MALPVTALLLPLALLLHAARPDIQMTQSPSSLSASVGDRVTITCKASDHINNWLAWYQQKPGQAPKLLIYGATTLETGVPSRFSGSGSGTDYTLTISSLQPEDFATYYCQQSWNTPWTFGQGTKLEIKRLEDLKNVFPPEVAVFEPSKAEIAHTQKATLVCLATGFYPDHVELSWWVNGKEVHSGVCTDPQPLKEQPALNDSRYCLSSRLRVSATFWQNPRNHFRCQVQFYGLSENDEWTQDRAKPVTQIVSAEAWGRADCGITSASYHQGVLSATILYEILLGKATLYAVLVSALVLMAMVKRKDSRGRAKRSGSGATNFSLLKQAGDVEENPGPTSATMDWIWRILFLVGAATGAHSEVQLLESGGGLVQPGGSLRLSCAASGFSFSSYALSWVRQAPGKGLEWVSSIGENDGTTDYADAVKGRFTISRDNSKNTLYLQMNSLRVEDTAVYYCVKDGVHWGQGTLVTVSSGSGGGGSGGGGSGGGGSFEQVQLQQPGAELVKPGASVKMSCKASGYAFSSYWINWMKQKPGQGLEWIGQIYPGDGDTNYNGKFKGRATLTADTSSSTAYMQLSSLTSEDSAVYFCARSITTVVGCAMDYWGQGTSVTVSSTRIQNPDPAVYQLRDSKSSDKSVCLFTDFDSQTNVSQSKDSDVYITDKCVLDMRSMDFKSNSAVAWSNKSDFACANAFNNSIIPEDTFFPSSDVPCDVKLVEKSFETDTNLNFQNLSVIGFRILLLKVAGFNLLMTLRLWSSRAKRSGSGVKQTLNFDLLKLAGDVESNPGPSRGHMTEYKPTVRLATRDDVPRAVRTLAAAFADYPATRHTVDPDRHIERVTELQELFLTRVGLDIGKVWVADDGAAVAVWTTPESVEAGAVFAEIGPRMAELSGSRLAAQQQMEGLLAPHRPKEPAWFLATVGVSPDHQGKGLGSAVVLPGVEAAERAGVPAFLETSAPRNLPFYERLGFTVTADVEVPEGPRTWCMTRKPGA

SEQ ID NO: 22996 - protein, 987 aa, Artificial Sequence
  Synthetic Polypeptide
MALPVTALLLPLALLLHAARPDIQMTQSPSSLSASVGDRVTITCKASDHINNWLAWYQQKPGQAPKLLIYGATTLETGVPSRFSGSGSGTDYTLTISSLQPEDFATYYCQQSWNTPWTFGQGTKLEIKRLEDLKNVFPPEVAVFEPSEAEISHTQKATLVCLATGFYPDHVELSWWVNGKEVHSGVCTDPQPLKEQPALNDSRYCLSSRLRVSATFWQNPRNHFRCQVQFYGLSENDEWTQDRAKPVTQIVSAEAWGRADCGFTSESYQQGVLSATILYEILLGKATLYAVLVSALVLMAMVKRKDSRGRAKRSGSGATNFSLLKQAGDVEENPGPTSATMDWIWRILFLVGAATGAHSEVQLLESGGGLVQPGGSLRLSCAASGFSFSSYALSWVRQAPGKGLEWVSSIGENDGTTDYADAVKGRFTISRDNSKNTLYLQMNSLRVEDTAVYYCVKDGVHWGQGTLVTVSSGSGGGGSGGGGSGGGGSFEQVQLQQPGAELVKPGASVKMSCKASGYAFSSYWINWMKQKPGQGLEWIGQIYPGDGDTNYNGKFKGRATLTADTSSSTAYMQLSSLTSEDSAVYFCARSITTVVGCAMDYWGQGTSVTVSSTRIQNPDPAVYQLRDSKSSDKSVCLFTDFDSQTNVSQSKDSDVYITDKCVLDMRSMDFKSNSAVAWSNKSDFACANAFNNSIIPEDTFFPSPESSCDVKLVEKSFETDTNLNFQNLSVIGFRILLLKVAGFNLLMTLRLWSSRAKRSGSGVKQTLNFDLLKLAGDVESNPGPSRGHMTEYKPTVRLATRDDVPRAVRTLAAAFADYPATRHTVDPDRHIERVTELQELFLTRVGLDIGKVWVADDGAAVAVWTTPESVEAGAVFAEIGPRMAELSGSRLAAQQQMEGLLAPHRPKEPAWFLATVGVSPDHQGKGLGSAVVLPGVEAAERAGVPAFLETSAPRNLPFYERLGFTVTADVEVPEGPRTWCMTRKPGA

SEQ ID NO: 22997 - protein, 1003 aa, Artificial Sequence
  Synthetic Polypeptide
MALPVTALLLPLALLLHAARPACEVQLVESGGGVVQPGRSLRLSCAASGFSFSGYGMHWVRQAPGKGLEWVAYISYDGSNKYYADSVKGRFTISRDNSKNTLYLQMNSLRAEDTAVYYCAKDPAWGLRLGESSSYDFDYWGQGTMVTVSSGTGGGGSGGGGSGGGGSEFDIQMTQSPSSLSASVGDRVTITCKASDHINNWLAWYQQKPGQAPKLLIYGATTLETGVPSRFSGSGSGTDYTLTISSLQPEDFATYYCQQSWNTPWTFGQGTKLEIKRLEDLKNVFPPEVAVFEPSEAEISHTQKATLVCLATGFYPDHVELSWWVNGKEVHSGVCTDPQPLKEQPALNDSRYCLSSRLRVSATFWQNPRNHFRCQVQFYGLSENDEWTQDRAKPVTQIVSAEAWGRADCGFTSESYQQGVLSATILYEILLGKATLYAVLVSALVLMAMVKRKDSRGRAKRSGSGATNFSLLKQAGDVEENPGPTSMDWIWRILFLVGAATGAHSFEQVQLQQPGAELVKPGASVKMSCKASGYAFSSYWINWMKQKPGQGLEWIGQIYPGDGDTNYNGKFKGRATLTADTSSSTAYMQLSSLTSEDSAVYFCARSITTVVGCAMDYWGQGTSVTVSSTRIQNPDPAVYQLRDSKSSDKSVCLFTDFDSQTNVSQSKDSDVYITDKCVLDMRSMDFKSNSAVAWSNKSDFACANAFNNSIIPEDTFFPSPESSCDVKLVEKSFETDTNLNFQNLSVIGFRILLLKVAGFNLLMTLRLWSSRAKRSGSGVKQTLNFDLLKLAGDVESNPGPSRGHMTEYKPTVRLATRDDVPRAVRTLAAAFADYPATRHTVDPDRHIERVTELQELFLTRVGLDIGKVWVADDGAAVAVWTTPESVEAGAVFAEIGPRMAELSGSRLAAQQQMEGLLAPHRPKEPAWFLATVGVSPDHQGKGLGSAVVLPGVEAAERAGVPAFLETSAPRNLPFYERLGFTVTADVEVPEGPRTWCMTRKPGA

SEQ ID NO: 22998 - protein, 1002 aa, Artificial Sequence
  Synthetic Polypeptide
MALPVTALLLPLALLLHAARPACQVQLQESGAGLLKPSETLSLTCAVYGGSFSAYNWNWIRQPPGKGLEWIGEINHRGDTAYNPSLKSRVTISVDTSKNQFSLNLTSVTAADTAVYYCAARGYSYGWPPGYISDAFDIWGQGTQVTVSSGTGGGGSGGGGSGGGGSEFDIQMTQSPSSLSASVGDRVTITCKASDHINNWLAWYQQKPGQAPKLLIYGATTLETGVPSRFSGSGSGTDYTLTISSLQPEDFATYYCQQSWNTPWTFGQGTKLEIKRLEDLKNVFPPEVAVFEPSEAEISHTQKATLVCLATGFYPDHVELSWWVNGKEVHSGVCTDPQPLKEQPALNDSRYCLSSRLRVSATFWQNPRNHFRCQVQFYGLSENDEWTQDRAKPVTQIVSAEAWGRADCGFTSESYQQGVLSATILYEILLGKATLYAVLVSALVLMAMVKRKDSRGRAKRSGSGATNFSLLKQAGDVEENPGPTSMDWIWRILFLVGAATGAHSFEQVQLQQPGAELVKPGASVKMSCKASGYAFSSYWINWMKQKPGQGLEWIGQIYPGDGDTNYNGKFKGRATLTADTSSSTAYMQLSSLTSEDSAVYFCARSITTVVGCAMDYWGQGTSVTVSSTRIQNPDPAVYQLRDSKSSDKSVCLFTDFDSQTNVSQSKDSDVYITDKCVLDMRSMDFKSNSAVAWSNKSDFACANAFNNSIIPEDTFFPSPESSCDVKLVEKSFETDTNLNFQNLSVIGFRILLLKVAGFNLLMTLRLWSSRAKRSGSGVKQTLNFDLLKLAGDVESNPGPSRGHMTEYKPTVRLATRDDVPRAVRTLAAAFADYPATRHTVDPDRHIERVTELQELFLTRVGLDIGKVWVADDGAAVAVWTTPESVEAGAVFAEIGPRMAELSGSRLAAQQQMEGLLAPHRPKEPAWFLATVGVSPDHQGKGLGSAVVLPGVEAAERAGVPAFLETSAPRNLPFYERLGFTVTADVEVPEGPRTWCMTRKPGA

SEQ ID NO: 22999 - protein, 999 aa, Artificial Sequence
  Synthetic Polypeptide
MALPVTALLLPLALLLHAARPACEVQLVESGGGVVQPGRSLRLSCAASGFPLISYGMHWVRQAPGKGLEWVAFMTYDGSNRYYADSVKGRFTISRDNSKNTLYLQMNSLRDEDTALYYCARDRIVGGRVPDSFDYWGQGTMVTVSSGTGGGGSGGGGSGGGGSEFDIQMTQSPSSLSASVGDRVTITCKASDHINNWLAWYQQKPGQAPKLLIYGATTLETGVPSRFSGSGSGTDYTLTISSLQPEDFATYYCQQSWNTPWTFGQGTKLEIKRLEDLKNVFPPEVAVFEPSEAEISHTQKATLVCLATGFYPDHVELSWWVNGKEVHSGVCTDPQPLKEQPALNDSRYCLSSRLRVSATFWQNPRNHFRCQVQFYGLSENDEWTQDRAKPVTQIVSAEAWGRADCGFTSESYQQGVLSATILYEILLGKATLYAVLVSALVLMAMVKRKDSRGRAKRSGSGATNFSLLKQAGDVEENPGPTSMDWIWRILFLVGAATGAHSFEQVQLQQPGAELVKPGASVKMSCKASGYAFSSYWINWMKQKPGQGLEWIGQIYPGDGDTNYNGKFKGRATLTADTSSSTAYMQLSSLTSEDSAVYFCARSITTVVGCAMDYWGQGTSVTVSSTRIQNPDPAVYQLRDSKSSDKSVCLFTDFDSQTNVSQSKDSDVYITDKCVLDMRSMDFKSNSAVAWSNKSDFACANAFNNSIIPEDTFFPSPESSCDVKLVEKSFETDTNLNFQNLSVIGFRILLLKVAGFNLLMTLRLWSSRAKRSGSGVKQTLNFDLLKLAGDVESNPGPSRGHMTEYKPTVRLATRDDVPRAVRTLAAAFADYPATRHTVDPDRHIERVTELQELFLTRVGLDIGKVWVADDGAAVAVWTTPESVEAGAVFAEIGPRMAELSGSRLAAQQQMEGLLAPHRPKEPAWFLATVGVSPDHQGKGLGSAVVLPGVEAAERAGVPAFLETSAPRNLPFYERLGFTVTADVEVPEGPRTWCMTRKPGA

SEQ ID NO: 23000 - protein, 989 aa, Artificial Sequence
  Synthetic Polypeptide
MALPVTALLLPLALLLHAARPDIQMTQSPSSLSASVGDRVTITCKASDHINNWLAWYQQKPGQAPKLLIYGATTLETGVPSRFSGSGSGTDYTLTISSLQPEDFATYYCQQSWNTPWTFGQGTKLEIKRLEDLKNVFPPEVAVFEPSEAEISHTQKATLVCLATGFYPDHVELSWWVNGKEVHSGVCTDPQPLKEQPALNDSRYCLSSRLRVSATFWQNPRNHFRCQVQFYGLSENDEWTQDRAKPVTQIVSAEAWGRADCGFTSESYQQGVLSATILYEILLGKATLYAVLVSALVLMAMVKRKDSRGRAKRSGSGATNFSLLKQAGDVEENPGPTSATMDWIWRILFLVGAATGAHSGPEVQLLESGGGLVQPGGSLRLSCAASGFSFSSYALSWVRQAPGKGLEWVSSIGENDGTTDYADAVKGRFTISRDNSKNTLYLQMNSLRVEDTAVYYCVKDGIHWGQGTLVTVSSGSGGGGSGGGGSGGGGSFEQVQLQQPGAELVKPGASVKMSCKASGYAFSSYWINWMKQKPGQGLEWIGQIYPGDGDTNYNGKFKGRATLTADTSSSTAYMQLSSLTSEDSAVYFCARSITTVVGCAMDYWGQGTSVTVSSTRIQNPDPAVYQLRDSKSSDKSVCLFTDFDSQTNVSQSKDSDVYITDKCVLDMRSMDFKSNSAVAWSNKSDFACANAFNNSIIPEDTFFPSPESSCDVKLVEKSFETDTNLNFQNLSVIGFRILLLKVAGFNLLMTLRLWSSRAKRSGSGVKQTLNFDLLKLAGDVESNPGPSRGHMTEYKPTVRLATRDDVPRAVRTLAAAFADYPATRHTVDPDRHIERVTELQELFLTRVGLDIGKVWVADDGAAVAVWTTPESVEAGAVFAEIGPRMAELSGSRLAAQQQMEGLLAPHRPKEPAWFLATVGVSPDHQGKGLGSAVVLPGVEAAERAGVPAFLETSAPRNLPFYERLGFTVTADVEVPEGPRTWCMTRKPGA

SEQ ID NO: 23001 - protein, 989 aa, Artificial Sequence
  Synthetic Polypeptide
MALPVTALLLPLALLLHAARPDIQMTQSPSSLSASVGDRVTITCKASDHINNWLAWYQQKPGQAPKLLIYGATTLETGVPSRFSGSGSGTDYTLTISSLQPEDFATYYCQQSWNTPWTFGQGTKLEIKRLEDLKNVFPPEVAVFEPSEAEISHTQKATLVCLATGFYPDHVELSWWVNGKEVHSGVCTDPQPLKEQPALNDSRYCLSSRLRVSATFWQNPRNHFRCQVQFYGLSENDEWTQDRAKPVTQIVSAEAWGRADCGFTSESYQQGVLSATILYEILLGKATLYAVLVSALVLMAMVKRKDSRGRAKRSGSGATNFSLLKQAGDVEENPGPTSATMDWIWRILFLVGAATGAHSGPEVQLLESGGGLVQPGGSLRLSCAASGFSFSGYALSWVRQAPGKGLEWVSSIGENDGTTDYADAVKGRFTISRDNSKNTLYLQMNSLRVEDTAVYYCVKDGVHWGQGTLVTVSSGSGGGGSGGGGSGGGGSFEQVQLQQPGAELVKPGASVKMSCKASGYAFSSYWINWMKQKPGQGLEWIGQIYPGDGDTNYNGKFKGRATLTADTSSSTAYMQLSSLTSEDSAVYFCARSITTVVGCAMDYWGQGTSVTVSSTRIQNPDPAVYQLRDSKSSDKSVCLFTDFDSQTNVSQSKDSDVYITDKCVLDMRSMDFKSNSAVAWSNKSDFACANAFNNSIIPEDTFFPSPESSCDVKLVEKSFETDTNLNFQNLSVIGFRILLLKVAGFNLLMTLRLWSSRAKRSGSGVKQTLNFDLLKLAGDVESNPGPSRGHMTEYKPTVRLATRDDVPRAVRTLAAAFADYPATRHTVDPDRHIERVTELQELFLTRVGLDIGKVWVADDGAAVAVWTTPESVEAGAVFAEIGPRMAELSGSRLAAQQQMEGLLAPHRPKEPAWFLATVGVSPDHQGKGLGSAVVLPGVEAAERAGVPAFLETSAPRNLPFYERLGFTVTADVEVPEGPRTWCMTRKPGA

SEQ ID NO: 23002 - protein, 991 aa, Artificial Sequence
  Synthetic Polypeptide
MALPVTALLLPLALLLHAARPDIQMTQSPSSLSASVGDRVTITCKASDHINNWLAWYQQKPGQAPKLLIYGATTLETGVPSRFSGSGSGTDYTLTISSLQPEDFATYYCQQSWNTPWTFGQGTKLEIKRLEGQPKANPTVTLFPPSSEELQANKATLVCLISDFYPGAVTVAWKADGSPVKAGVETTKPSKQSNNKYAASSYLSLTPEQWKSHRSYSCQVTHEGSTVEKTVAPTECSGRADCGFTSESYQQGVLSATILYEILLGKATLYAVLVSALVLMAMVKRKDSRGRAKRSGSGATNFSLLKQAGDVEENPGPTSATMDWIWRILFLVGAATGAHSEVQLLESGGGLVQPGGSLRLSCAASGFSFSSYALSWVRQAPGKGLEWVSSIGENDGTTDYADAVKGRFTISRDNSKNTLYLQMNSLRVEDTAVYYCVKDGVHWGQGTLVTVSSGSGGGGSGGGGSGGGGSFEQVQLQQPGAELVKPGASVKMSCKASGYAFSSYWINWMKQKPGQGLEWIGQIYPGDGDTNYNGKFKGRATLTADTSSSTAYMQLSSLTSEDSAVYFCARSITTVVGCAMDYWGQGTSVTVSSTRASTKGPSVFPLAPSSKSTSGGTAALGCLVKDYFPEPVTVSWNSGALTSGVHTFPAVLQSSGLYSLSSVVTVPSSSLGTQTYICNVNHKPSNTKVDKRVEPKSCIPEDTFFPSPESSCDVKLVEKSFETDTNLNFQNLSVIGFRILLLKVAGFNLLMTLRLWSSRAKRSGSGVKQTLNFDLLKLAGDVESNPGPSRGHMTEYKPTVRLATRDDVPRAVRTLAAAFADYPATRHTVDPDRHIERVTELQELFLTRVGLDIGKVWVADDGAAVAVWTTPESVEAGAVFAEIGPRMAELSGSRLAAQQQMEGLLAPHRPKEPAWFLATVGVSPDHQGKGLGSAVVLPGVEAAERAGVPAFLETSAPRNLPFYERLGFTVTADVEVPEGPRTWCMTRKPGA

SEQ ID NO: 23003 - protein, 982 aa, Artificial Sequence
  Synthetic Polypeptide
MALPVTALLLPLALLLHAARPDIQMTQSPSSLSASVGDRVTITCKASDHINNWLAWYQQKPGQAPKLLIYGATTLETGVPSRFSGSGSGTDYTLTISSLQPEDFATYYCQQSWNTPWTFGQGTKLEIKRLEADVSPKPTIFLPSIAETKLQKAGTYLCLLEKFFPDVIKIHWQEKKSNTILGSQEGNTMKTNDTYMKFSWLTVPEKSLDKEHRCIVRHENNKNGVDQEIIFPPIKTDVITMDPKDNCSKDANDTLLLQLTNTSAYYMYLLLLLKSVVYFAIITCCLLRRTAFCCNGEKSRAKRSGSGATNFSLLKQAGDVEENPGPTSTMDWIWRILFLVGAATGAHSEVQLLESGGGLVQPGGSLRLSCAASGFSFSSYALSWVRQAPGKGLEWVSSIGENDGTTDYADAVKGRFTISRDNSKNTLYLQMNSLRVEDTAVYYCVKDGVHWGQGTLVTVSSGSGGGGSGGGGSFEQVQLQQPGAELVKPGASVKMSCKASGYAFSSYWINWMKQKPGQGLEWIGQIYPGDGDTNYNGKFKGRATLTADTSSSTAYMQLSSLTSEDSAVYFCARSITTVVGCAMDYWGQGTSVTVSSTRPHTKPSVFVMKNGTNVACLVKEFYPKDIRINLVSSKKITEFDPAIVISPSGKYNAVKLGKYEDSNSVTCSVQHDNKTVHSTDFEVKTDSTDHVKPKETENTKQPSKSCHKPKAIVHTEKVNMMSLTVLGLRMLFAKTVAVNFLLTAKLFFLRAKRSGSGVKQTLNFDLLKLAGDVESNPGPSRGHMTEYKPTVRLATRDDVPRAVRTLAAAFADYPATRHTVDPDRHIERVTELQELFLTRVGLDIGKVWVADDGAAVAVWTTPESVEAGAVFAEIGPRMAELSGSRLAAQQQMEGLLAPHRPKEPAWFLATVGVSPDHQGKGLGSAVVLPGVEAAERAGVPAFLETSAPRNLPFYERLGFTVTADVEVPEGPRTWCMTRKPGA

SEQ ID NO: 23004 - protein, 1005 aa, Artificial Sequence
  Synthetic Polypeptide
MALPVTALLLPLALLLHAARPDIQMTQSPSSLSASVGDRVTITCKASDHINNWLAWYQQKPGQAPKLLIYGATTLETGVPSRFSGSGSGTDYTLTISSLQPEDFATYYCQQSWNTPWTFGQGTKLEIKRLEDLKNVFPPEVAVFEPSEAEISHTQKATLVCLATGFYPDHVELSWWVNGKEVHSGVCTDPQPLKEQPALNDSRYCLSSRLRVSATFWQNPRNHFRCQVQFYGLSENDEWTQDRAKPVTQIVSAEAWGRADCGFTSESYQQGVLSATILYEILLGKATLYAVLVSALVLMAMVKRKDSRGRAKRSGSGATNFSLLKQAGDVEENPGPTSATMDWIWRILFLVGAATGAHSEVQLLESGGGLVQPGGSLRLSCAASGFSFSSYALSWVRQAPGKGLEWVSSIGENDGTTDYADAVKGRFTISRDNSKNTLYLQMNSLRVEDTAVYYCVKDGVHWGQGTLVTVSSGSGGGGSGGGGSFEQVQLQQPGAELVKPGASVKMSCKASGYAFSSYWINWMKQKPGQGLEWIGQIYPGDGDTNYNGKFKGRATLTADTSSSTAYMQLSSLTSEDSAVYFCARSITTVVGCAMDYWGQGTSVTVSSTRASTKGPSVFPLAPSSKSTSGGTAALGCLVKDYFPEPVTVSWNSGALTSGVHTFPAVLQSSGLYSLSSVVTVPSSSLGTQTYICNVNHKPSNTKVDKRVEPKSCIPEDTFFPSPESSCDVKLVEKSFETDTNLNFQNLSVIGFRILLLKVAGFNLLMTLRLWSSRAKRSGSGVKQTLNFDLLKLAGDVESNPGPSRGHMTEYKPTVRLATRDDVPRAVRTLAAAFADYPATRHTVDPDRHIERVTELQELFLTRVGLDIGKVWVADDGAAVAVWTTPESVEAGAVFAEIGPRMAELSGSRLAAQQQMEGLLAPHRPKEPAWFLATVGVSPDHQGKGLGSAVVLPGVEAAERAGVPAFLETSAPRNLPFYERLGFTVTADVEVPEGPRTWCMTRKPGA

SEQ ID NO: 23005 - protein, 1010 aa, Artificial Sequence
  Synthetic Polypeptide
MALPVTALLLPLALLLHAARPDIQMTQSPSSLSASVGDRVTITCKASDHINNWLAWYQQKPGQAPKLLIYGATTLETGVPSRFSGSGSGTDYTLTISSLQPEDFATYYCQQSWNTPWTFGQGTKLEIKRLEDLKNVFPPEVAVFEPSEAEISHTQKATLVCLATGFYPDHVELSWWVNGKEVHSGVCTDPQPLKEQPALNDSRYCLSSRLRVSATFWQNPRNHFRCQVQFYGLSENDEWTQDRAKPVTQIVSAEAWGRADCGFTSESYQQGVLSATILYEILLGKATLYAVLVSALVLMAMVKRKDSRGRAKRSGSGATNFSLLKQAGDVEENPGPTSATMDWIWRILFLVGAATGAHSEVQLLESGGGLVQPGGSLRLSCAASGFSFSSYALSWVRQAPGKGLEWVSSIGENDGTTDYADAVKGRFTISRDNSKNTLYLQMNSLRVEDTAVYYCVKDGVHWGQGTLVTVSSGSGGGGSGGGGSGGGGSFEQVQLQQPGAELVKPGASVKMSCKASGYAFSSYWINWMKQKPGQGLEWIGQIYPGDGDTNYNGKFKGRATLTADTSSSTAYMQLSSLTSEDSAVYFCARSITTVVGCAMDYWGQGTSVTVSSTRASTKGPSVFPLAPSSKSTSGGTAALGCLVKDYFPEPVTVSWNSGALTSGVHTFPAVLQSSGLYSLSSVVTVPSSSLGTQTYICNVNHKPSNTKVDKRVEPKSCIPEDTFFPSPESSCDVKLVEKSFETDTNLNFQNLSVIGFRILLLKVAGFNLLMTLRLWSSRAKRSGSGVKQTLNFDLLKLAGDVESNPGPSRGHMTEYKPTVRLATRDDVPRAVRTLAAAFADYPATRHTVDPDRHIERVTELQELFLTRVGLDIGKVWVADDGAAVAVWTTPESVEAGAVFAEIGPRMAELSGSRLAAQQQMEGLLAPHRPKEPAWFLATVGVSPDHQGKGLGSAVVLPGVEAAERAGVPAFLETSAPRNLPFYERLGFTVTADVEVPEGPRTWCMTRKPGA

SEQ ID NO: 23006 - protein, 912 aa, Artificial Sequence
  Synthetic Polypeptide
MALPVTALLLPLALLLHAARPDIQMTQSPSSLSASVGDRVTITCKASDHINNWLAWYQQKPGQAPKLLIYGATTLETGVPSRFSGSGSGTDYTLTISSLQPEDFATYYCQQSWNTPWTFGQGTKLEIKRLEDLKNVFPPEVAVFEPSEAEISHTQKATLVCLATGFYPDHVELSWWVNGKEVHSGVCTDPQPLKEQPALNDSRYCLSSRLRVSATFWQNPRNHFRCQVQFYGLSENDEWTQDRAKPVTQIVSAEAWGRADCGFTSESYQQGVLSATILYEILLGKATLYAVLVSALVLMAMVKRKDSRGRAKRSGSGATNFSLLKQAGDVEENPGPTSATMDWIWRILFLVGAATGAHSGPVCMPCFTTDQQMARKCSDCCGGKGRGKCYGPQCLCRGSGGGGSGGGGSGGGGSFEQVQLQQPGAELVKPGASVKMSCKASGYAFSSYWINWMKQKPGQGLEWIGQIYPGDGDTNYNGKFKGRATLTADTSSSTAYMQLSSLTSEDSAVYFCARSITTVVGCAMDYWGQGTSVTVSSTRIQNPDPAVYQLRDSKSSDKSVCLFTDFDSQTNVSQSKDSDVYITDKCVLDMRSMDFKSNSAVAWSNKSDFACANAFNNSIIPEDTFFPSPESSCDVKLVEKSFETDTNLNFQNLSVIGFRILLLKVAGFNLLMTLRLWSSRAKRSGSGVKQTLNFDLLKLAGDVESNPGPSRAHMTEYKPTVRLATRDDVPRAVRTLAAAFADYPATRHTVDPDRHIERVTELQELFLTRVGLDIGKVWVADDGAAVAVWTTPESVEAGAVFAEIGPRMAELSGSRLAAQQQMEGLLAPHRPKEPAWFLATVGVSPDHQGKGLGSAVVLPGVEAAERAGVPAFLETSAPRNLPFYERLGFTVTADVEVPEGPRTWCMTRKPGA

SEQ ID NO: 23007 - protein, 1050 aa, Artificial Sequence
  Synthetic Polypeptide
MALPVTALLLPLALLLHAARPMCMPCFTTDHQMARKCDDCCGGKGRGKCYGPQCLCRGTGGGGSGGGGSGGGGSEFDIQMTQSPSSLSASVGDRVTITCKASDHINNWLAWYQQKPGQAPKLLIYGATTLETGVPSRFSGSGSGTDYTLTISSLQPEDFATYYCQQSWNTPWTFGQGTKLEIKRLEIQNPDPAVYQLRDSKSSDKSVCLFTDFDSQTNVSQSKDSDVYITDKCVLDMRSMDFKSNSAVAWSNKSDFACANAFNNSIIPEDTFFPSSDVPCDVKLVEKSFETDTNLNFQNLSVIGFRILLLKVAGFNLLMTLRLWSSRAKRSGSGVKQTLNFDLLKLAGDVESNPGPTSATMDWIWRILFLVGAATGAHSGPQVQLQESGGGLAQAGGSLRLSCAASGRTFSMGWFRQAPGKEREFVAAITYSGGSPYYASSVRGRFTISRDNAKNTVYLQMNSLKPEDTAVYYCAANPTYGSDWNAENWGQGTQVTVSSGSGGGGSGGGGSGGGGSFEQVQLQQPGAELVKPGASVKMSCKASGYAFSSYWINWMKQKPGQGLEWIGQIYPGDGDTNYNGKFKGRATLTADTSSSTAYMQLSSLTSEDSAVYFCARSITTVVGCAMDYWGQGTSVTVSSTREDLKNVFPPEVAVFEPSKAEIAHTQKATLVCLATGFYPDHVELSWWVNGKEVHSGVCTDPQPLKEQPALNDSRYCLSSRLRVSATFWQNPRNHFRCQVQFYGLSENDEWTQDRAKPVTQIVSAEAWGRADCGITSASYHQGVLSATILYEILLGKATLYAVLVSALVLMAMVKRKDSRGRAKRSGSGATNFSLLKQAGDVEENPGPSRGHMTEYKPTVRLATRDDVPRAVRTLAAAFADYPATRHTVDPDRHIERVTELQELFLTRVGLDIGKVWVADDGAAVAVWTTPESVEAGAVFAEIGPRMAELSGSRLAAQQQMEGLLAPHRPKEPAWFLATVGVSPDHQGKGLGSAVVLPGVEAAERAGVPAFLETSAPRNLPFYERLGFTVTADVEVPEGPRTWCMTRKPGA

SEQ ID NO: 23008 - protein, 912 aa, Artificial Sequence
  Synthetic Polypeptide
MALPVTALLLPLALLLHAARPDIQMTQSPSSLSASVGDRVTITCKASDHINNWLAWYQQKPGQAPKLLIYGATTLETGVPSRFSGSGSGTDYTLTISSLQPEDFATYYCQQSWNTPWTFGQGTKLEIKRLEDLKNVFPPEVAVFEPSEAEISHTQKATLVCLATGFYPDHVELSWWVNGKEVHSGVCTDPQPLKEQPALNDSRYCLSSRLRVSATFWQNPRNHFRCQVQFYGLSENDEWTQDRAKPVTQIVSAEAWGRADCGFTSESYQQGVLSATILYEILLGKATLYAVLVSALVLMAMVKRKDSRGRAKRSGSGATNFSLLKQAGDVEENPGPTSATMDWIWRILFLVGAATGAHSGPVCMPCFTTDQQMARKCSDCCGGKGRGKCYGPQCLCRGSGGGGSGGGGSGGGGSFEQVQLQQPGAELVKPGASVKMSCKASGYAFSSYWINWMKQKPGQGLEWIGQIYPGDGDTNYNGKFKGRATLTADTSSSTAYMQLSSLTSEDSAVYFCARSITTVVGCAMDYWGQGTSVTVSSTRIQNPDPAVYQLRDSKSSDKSVCLFTDFDSQTNVSQSKDSDVYITDKCVLDMRSMDFKSNSAVAWSNKSDFACANAFNNSIIPEDTFFPSPESSCDVKLVEKSFETDTNLNFQNLSVIGFRILLLKVAGFNLLMTLRLWSSRAKRSGSGVKQTLNFDLLKLAGDVESNPGPSRGHMTEYKPTVRLATRDDVPRAVRTLAAAFADYPATRHTVDPDRHIERVTELQELFLTRVGLDIGKVWVADDGAAVAVWTTPESVEAGAVFAEIGPRMAELSGSRLAAQQQMEGLLAPHRPKEPAWFLATVGVSPDHQGKGLGSAVVLPGVEAAERAGVPAFLETSAPRNLPFYERLGFTVTADVEVPEGPRTWCMTRKPGA

SEQ ID NO: 23009 - protein, 821 aa, Artificial Sequence
  Synthetic Polypeptide
MALPVTALLLPLALLLHAARPQLQLQESGPGLVKPSETLSLTCTVSGDSISSGDYYWGWIRQPPGKGLEWIGHIYYSGVTYYNPSLKSRVTISVDTSRNQFSLKLSSVTAADTAVYYCTREDSSNWRSRGQGTLVTVSSLEGQPKANPTVTLFPPSSEELQANKATLVCLISDFYPGAVTVAWKADGSPVKAGVETTKPSKQSNNKYAASSYLSLTPEQWKSHRSYSCQVTHEGSTVEKTVAPTECSPIKTDVITMDPKDNCSKDANDTLLLQLTNTSAYYMYLLLLLKSVVYFAIITCCLLRRTAFCCNGEKSRAKRSGSGATNFSLLKQAGDVEENPGPTSMDWIWRILFLVGAATGAHSFEYAKEMRNAYWEIALLPNLTNQQKRAPIRKLYDDPSQSSELLSEAKKLNDSQTRASTKGPSVFPLAPSSKSTSGGTAALGCLVKDYFPEPVTVSWNSGALTSGVHTFPAVLQSSGLYSLSSVVTVPSSSLGTQTYICNVNHKPSNTKVDKRVEPKSCEVKTDSTDHVKPKETENTKQPSKSCHKPKAIVHTEKVNMMSLTVLGLRMLFAKTVAVNFLLTAKLFFLRAKRSGSGVKQTLNFDLLKLAGDVESNPGPSRGHMTEYKPTVRLATRDDVPRAVRTLAAAFADYPATRHTVDPDRHIERVTELQELFLTRVGLDIGKVWVADDGAAVAVWTTPESVEAGAVFAEIGPRMAELSGSRLAAQQQMEGLLAPHRPKEPAWFLATVGVSPDHQGKGLGSAVVLPGVEAAERAGVPAFLETSAPRNLPFYERLGFTVTADVEVPEGPRTWCMTRKPGA

SEQ ID NO: 23010 - protein, 1000 aa, Artificial Sequence
  Synthetic Polypeptide
MALPVTALLLPLALLLHAARPDIQMTQSPSSLSASVGDRVTITCKASDHINNWLAWYQQKPGQAPKLLIYGATTLETGVPSRFSGSGSGTDYTLTISSLQPEDFATYYCQQSWNTPWTFGQGTKLEIKRLEDLKNVFPPEVAVFEPSEAEISHTQKATLVCLATGFYPDHVELSWWVNGKEVHSGVCTDPQPLKEQPALNDSRYCLSSRLRVSATFWQNPRNHFRCQVQFYGLSENDEWTQDRAKPVTQIVSAEAWGRADCGFTSESYQQGVLSATILYEILLGKATLYAVLVSALVLMAMVKRKDSRGRAKRSGSGATNFSLLKQAGDVEENPGPTSATMDWIWRILFLVGAATGAHSGPGSDLGIKLLFAAAKGQDDEVRILLAAGADVNAKDFEGYTPLHVAAYDGHLEIVEVLLKAGADVNAKDSQGRTPLHEAAYSGHLEIVEVLLKAGADVNAQDDAGETPADLAAAWGHEDIAEVLQKGSGGGGSGGGGSGGGGSFEQVQLQQPGAELVKPGASVKMSCKASGYAFSSYWINWMKQKPGQGLEWIGQIYPGDGDTNYNGKFKGRATLTADTSSSTAYMQLSSLTSEDSAVYFCARSITTVVGCAMDYWGQGTSVTVSSTRIQNPDPAVYQLRDSKSSDKSVCLFTDFDSQTNVSQSKDSDVYITDKCVLDMRSMDFKSNSAVAWSNKSDFACANAFNNSIIPEDTFFPSPESSCDVKLVEKSFETDTNLNFQNLSVIGFRILLLKVAGFNLLMTLRLWSSRAKRSGSGVKQTLNFDLLKLAGDVESNPGPSRGHMTEYKPTVRLATRDDVPRAVRTLAAAFADYPATRHTVDPDRHIERVTELQELFLTRVGLDIGKVWVADDGAAVAVWTTPESVEAGAVFAEIGPRMAELSGSRLAAQQQMEGLLAPHRPKEPAWFLATVGVSPDHQGKGLGSAVVLPGVEAAERAGVPAFLETSAPRNLPFYERLGFTVTADVEVPEGPRTWCMTRKPGA

SEQ ID NO: 23011 - protein, 995 aa, Artificial Sequence
  Synthetic Polypeptide
MALPVTALLLPLALLLHAARPDIQMTQSPSSLSASVGDRVTITCKASDHINNWLAWYQQKPGQAPKLLIYGATTLETGVPSRFSGSGSGTDYTLTISSLQPEDFATYYCQQSWNTPWTFGQGTKLEIKRLEDLKNVFPPEVAVFEPSEAEISHTQKATLVCLATGFYPDHVELSWWVNGKEVHSGVCTDPQPLKEQPALNDSRYCLSSRLRVSATFWQNPRNHFRCQVQFYGLSENDEWTQDRAKPVTQIVSAEAWGRADCGFTSESYQQGVLSATILYEILLGKATLYAVLVSALVLMAMVKRKDSRGRAKRSGSGATNFSLLKQAGDVEENPGPTSATMDWIWRILFLVGAATGAHSGPEVQLVESGGGLVQPGGSLRLSCAASGSIFGFNDMAWYRQAPGKQRELVALISRVGVTSSADSVKGRFTISRVNAKDTVYLQMNSLKPEDTAVYYCYMDQRLDGSTLAYWGQGTQVTVSSGSGGGGSGGGGSGGGGSFEQVQLQQPGAELVKPGASVKMSCKASGYAFSSYWINWMKQKPGQGLEWIGQIYPGDGDTNYNGKFKGRATLTADTSSSTAYMQLSSLTSEDSAVYFCARSITTVVGCAMDYWGQGTSVTVSSTRIQNPDPAVYQLRDSKSSDKSVCLFTDFDSQTNVSQSKDSDVYITDKCVLDMRSMDFKSNSAVAWSNKSDFACANAFNNSIIPEDTFFPSPESSCDVKLVEKSFETDTNLNFQNLSVIGFRILLLKVAGFNLLMTLRLWSSRAKRSGSGVKQTLNFDLLKLAGDVESNPGPSRGHMTEYKPTVRLATRDDVPRAVRTLAAAFADYPATRHTVDPDRHIERVTELQELFLTRVGLDIGKVWVADDGAAVAVWTTPESVEAGAVFAEIGPRMAELSGSRLAAQQQMEGLLAPHRPKEPAWFLATVGVSPDHQGKGLGSAVVLPGVEAAERAGVPAFLETSAPRNLPFYERLGFTVTADVEVPEGPRTWCMTRKPGA

SEQ ID NO: 23012 - protein, 1000 aa, Artificial Sequence; identical to SEQ ID NO: 23010
  Synthetic Polypeptide

SEQ ID NO: 23013 - protein, 831 aa, Artificial Sequence
  Synthetic Polypeptide
MALPVTALLLPLALLLHAARPDEFVDNKFNKERYSAYYEIWQLPNLNVRQKAAFIGSLQDDPSQSANLLAEAKKLNDAQAPKLEGQPKANPTVTLFPPSSEELQANKATLVCLISDFYPGAVTVAWKADGSPVKAGVETTKPSKQSNNKYAASSYLSLTPEQWKSHRSYSCQVTHEGSTVEKTVAPTECSPIKTDVITMDPKDNCSKDANDTLLLQLTNTSAYYMYLLLLLKSVVYFAIITCCLLRRTAFCCNGEKSRAKRSGSGATNFSLLKQAGDVEENPGPTSMDWIWRILFLVGAATGAHSFEVQLLESGGGLIQPGGSLRLSCAASGFTFSSHAMTWVRQAPGKGLEWVSAISGSGDYTHYADSVKGRFTISRDNSKNTVYLQMNSLRAEDSAVYYCAKDEDGGSLLGHRGQGTLVTVSSTRASTKGPSVFPLAPSSKSTSGGTAALGCLVKDYFPEPVTVSWNSGALTSGVHTFPAVLQSSGLYSLSSVVTVPSSSLGTQTYICNVNHKPSNTKVDKRVEPKSCEVKTDSTDHVKPKETENTKQPSKSCHKPKAIVHTEKVNMMSLTVLGLRMLFAKTVAVNFLLTAKLFFLRAKRSGSGVKQTLNFDLLKLAGDVESNPGPSRGHMTEYKPTVRLATRDDVPRAVRTLAAAFADYPATRHTVDPDRHIERVTELQELFLTRVGLDIGKVWVADDGAAVAVWTTPESVEAGAVFAEIGPRMAELSGSRLAAQQQMEGLLAPHRPKEPAWFLATVGVSPDHQGKGLGSAVVLPGVEAAERAGVPAFLETSAPRNLPFYERLGFTVTADVEVPEGPRTWCMTRKPGA

SEQ ID NO: 23014 - protein, 934 aa, Artificial Sequence
  Synthetic Polypeptide
MALPVTALLLPLALLLHAARPDIQMTQSPSSLSASVGDRVTITCKASDHINNWLAWYQQKPGQAPKLLIYGATTLETGVPSRFSGSGSGTDYTLTISSLQPEDFATYYCQQSWNTPWTFGQGTKLEIKRLEDLKNVFPPEVAVFEPSEAEISHTQKATLVCLATGFYPDHVELSWWVNGKEVHSGVCTDPQPLKEQPALNDSRYCLSSRLRVSATFWQNPRNHFRCQVQFYGLSENDEWTQDRAKPVTQIVSAEAWGRADCGFTSESYQQGVLSATILYEILLGKATLYAVLVSALVLMAMVKRKDSRGRAKRSGSGATNFSLLKQAGDVEENPGPTSATMDWIWRILFLVGAATGAHSGPVDNKFNKERYSAYYEIWQLPNLNVRQKAAFIGSLQDDPSQSANLLAEAKKLNDAQAPKGSGGGGSGGGGSGGGGSFEQVQLQQPGAELVKPGASVKMSCKASGYAFSSYWINWMKQKPGQGLEWIGQIYPGDGDTNYNGKFKGRATLTADTSSSTAYMQLSSLTSEDSAVYFCARSITTVVGCAMDYWGQGTSVTVSSTRIQNPDPAVYQLRDSKSSDKSVCLFTDFDSQTNVSQSKDSDVYITDKCVLDMRSMDFKSNSAVAWSNKSDFACANAFNNSIIPEDTFFPSPESSCDVKLVEKSFETDTNLNFQNLSVIGFRILLLKVAGFNLLMTLRLWSSRAKRSGSGVKQTLNFDLLKLAGDVESNPGPSRGHMTEYKPTVRLATRDDVPRAVRTLAAAFADYPATRHTVDPDRHIERVTELQELFLTRVGLDIGKVWVADDGAAVAVWTTPESVEAGAVFAEIGPRMAELSGSRLAAQQQMEGLLAPHRPKEPAWFLATVGVSPDHQGKGLGSAVVLPGVEAAERAGVPAFLETSAPRNLPFYERLGFTVTADVEVPEGPRTWCMTRKPGA

SEQ ID NO: 23015 - protein, 994 aa, Artificial Sequence
  Synthetic Polypeptide
MTIRLLCYMGFYFLGAGLMEADIYQTPRYLVIGTGKKITLECSQTMGHDKMYWYQQDPGMELHLIHYSYGVNSTEKGDLSSESTVSRIRTEHFPLTLESARPSHTSQYLCASSEARGLAEFTDTQYFGPGTRLTVLEDLKNVFPPEVAVFEPSEAEISHTQKATLVCLATGFYPDHVELSWWVNGKEVHSGVCTDPQPLKEQPALNDSRYCLSSRLRVSATFWQNPRNHFRCQVQFYGLSENDEWTQDRAKPVTQIVSAEAWGRADCGFTSESYQQGVLSATILYEILLGKATLYAVLVSALVLMAMVKRKDSRGRAKRSGSGATNFSLLKQAGDVEENPGPTSATMDWIWRILFLVGAATGAHSGPQVQLQESGGGLAQAGGSLRLSCAASGRTFSMGWFRQAPGKEREFVAAITYSGGSPYYASSVRGRFTISRDNAKNTVYLQMNSLKPEDTAVYYCAANPTYGSDWNAENWGQGTQVTVSSGSGGGGSGGGGSGGGGSFEAQTVTQSQPEMSVQEAETVTLSCTYDTSESDYYLFWYKQPPSRQMILVIRQEAYKQQNATENRFSVNFQKAAKSFSLKISDSQLGDAAMYFCAYRSAVNARLMFGDGTQLVVKPNTRIQNPDPAVYQLRDSKSSDKSVCLFTDFDSQTNVSQSKDSDVYITDKCVLDMRSMDFKSNSAVAWSNKSDFACANAFNNSIIPEDTFFPSPESSCDVKLVEKSFETDTNLNFQNLSVIGFRILLLKVAGFNLLMTLRLWSSRAKRSGSGVKQTLNFDLLKLAGDVESNPGPSRGHMTEYKPTVRLATRDDVPRAVRTLAAAFADYPATRHTVDPDRHIERVTELQELFLTRVGLDIGKVWVADDGAAVAVWTTPESVEAGAVFAEIGPRMAELSGSRLAAQQQMEGLLAPHRPKEPAWFLATVGVSPDHQGKGLGSAVVLPGVEAAERAGVPAFLETSAPRNLPFYERLGFTVTADVEVPEGPRTWCMTRKPGA

SEQ ID NO: 23016 - protein, 1155 aa, Artificial Sequence
  Synthetic Polypeptide
MALPVTALLLPLALLLHAARPACEVQLLESGGGLIQPGGSLRLSCAASGFTFSSHAMTWVRQAPGKGLEWVSAISGSGDYTHYADSVKGRFTISRDNSKNTVYLQMNSLRAEDSAVYYCAKDEDGGSLLGHRGQGTLVTVSSGTGGGGSGGGGSGGGGSEFAGHLEQPQISSTKTLSKTARLECVVSGITISATSVYWYRERPGEVIQFLVSISYDGTVRKESGIPSGKFEVDRIPETSTSTLTIHNVEKQDIATYYCALWEAQQELGKKIKVFGPGTKLIITDKQLDKQLDADVSPKPTIFLPSIAETKLQKAGTYLCLLEKFFPDVIKIHWQEKKSNTILGSQEGNTMKTNDTYMKFSWLTVPEKSLDKEHRCIVRHENNKNGVDQEIIFPPIKTDVITMDPKDNCSKDANDTLLLQLTNTSAYYMYLLLLLKSVVYFAIITCCLLRRTAFCCNGEKSRAKRSGSGATNFSLLKQAGDVEENPGPTSATMDWIWRILFLVGAATGAHSGPQVQLQESGGGLAQAGGSLRLSCAASGRTFSMGWFRQAPGKEREFVAAITYSGGSPYYASSVRGRFTISRDNAKNTVYLQMNSLKPEDTAVYYCAANPTYGSDWNAENWGQGTQVTVSSGSGGGGSGGGGSGGGGSFEAIELVPEHQTVPVSIGVPATLRCSMKGEAIGNYYINWYRKTQGNTMTFIYREKDIYGPGFKDNFQGDIDIAKNLAVLKILAPSERDEGSYYCACDTLGMGGEYTDKLIFGKGTRVTVEPRSQPHTKPSVFVMKNGTNVACLVKEFYPKDIRINLVSSKKITEFDPAIVISPSGKYNAVKLGKYEDSNSVTCSVQHDNKTVHSTDFEVKTDSTDHVKPKETENTKQPSKSCHKPKAIVHTEKVNMMSLTVLGLRMLFAKTVAVNFLLTAKLFFLRAKRSGSGVKQTLNFDLLKLAGDVESNPGPSRAHMTEYKPTVRLATRDDVPRAVRTLAAAFADYPATRHTVDPDRHIERVTELQELFLTRVGLDIGKVWVADDGAAVAVWTTPESVEAGAVFAEIGPRMAELSGSRLAAQQQMEGLLAPHRPKEPAWFLATVGVSPDHQGKGLGSAVVLPGVEAAERAGVPAFLETSAPRNLPFYERLGFTVTADVEVPEGPRTWCMTRKPGA

SEQ ID NO: 23017 - protein, 1017 aa, Artificial Sequence
  Synthetic Polypeptide
MALPVTALLLPLALLLHAARPACAGHLEQPQISSTKTLSKTARLECVVSGITISATSVYWYRERPGEVIQFLVSISYDGTVRKESGIPSGKFEVDRIPETSTSTLTIHNVEKQDIATYYCALWEAQQELGKKIKVFGPGTKLIITDKQLDKQLDADVSPKPTIFLPSIAETKLQKAGTYLCLLEKFFPDVIKIHWQEKKSNTILGSQEGNTMKTNDTYMKFSWLTVPEKSLDKEHRCIVRHENNKNGVDQEIIFPPIKTDVITMDPKDNCSKDANDTLLLQLTNTSAYYMYLLLLLKSVVYFAIITCCLLRRTAFCCNGEKSRAKRSGSGATNFSLLKQAGDVEENPGPTSATMDWIWRILFLVGAATGAHSGPQVQLQESGGGLAQAGGSLRLSCAASGRTFSMGWFRQAPGKEREFVAAITYSGGSPYYASSVRGRFTISRDNAKNTVYLQMNSLKPEDTAVYYCAANPTYGSDWNAENWGQGTQVTVSSGSGGGGSGGGGSGGGGSFEAIELVPEHQTVPVSIGVPATLRCSMKGEAIGNYYINWYRKTQGNTMTFIYREKDIYGPGFKDNFQGDIDIAKNLAVLKILAPSERDEGSYYCACDTLGMGGEYTDKLIFGKGTRVTVEPRSQPHTKPSVFVMKNGTNVACLVKEFYPKDIRINLVSSKKITEFDPAIVISPSGKYNAVKLGKYEDSNSVTCSVQHDNKTVHSTDFEVKTDSTDHVKPKETENTKQPSKSCHKPKAIVHTEKVNMMSLTVLGLRMLFAKTVAVNFLLTAKLFFLRAKRSGSGVKQTLNFDLLKLAGDVESNPGPSRAHMTEYKPTVRLATRDDVPRAVRTLAAAFADYPATRHTVDPDRHIERVTELQELFLTRVGLDIGKVWVADDGAAVAVWTTPESVEAGAVFAEIGPRMAELSGSRLAAQQQMEGLLAPHRPKEPAWFLATVGVSPDHQGKGLGSAVVLPGVEAAERAGVPAFLETSAPRNLPFYERLGFTVTADVEVPEGPRTWCMTRKPGA

SEQ ID NO: 23018 - protein, 1132 aa, Artificial Sequence
  Synthetic Polypeptide
MALPVTALLLPLALLLHAARPACEVQLLESGGGLIQPGGSLRLSCAASGFTFSSHAMTWVRQAPGKGLEWVSAISGSGDYTHYADSVKGRFTISRDNSKNTVYLQMNSLRAEDSAVYYCAKDEDGGSLLGHRGQGTLVTVSSGTGGGGSGGGGSGGGGSEFDIQMTQSPSSLSASVGDRVTITCKASDHINNWLAWYQQKPGQAPKLLIYGATTLETGVPSRFSGSGSGTDYTLTISSLQPEDFATYYCQQSWNTPWTFGQGTKLEIKRLEDLKNVFPPEVAVFEPSKAEIAHTQKATLVCLATGFYPDHVELSWWVNGKEVHSGVCTDPQPLKEQPALNDSRYCLSSRLRVSATFWQNPRNHFRCQVQFYGLSENDEWTQDRAKPVTQIVSAEAWGRADCGITSASYHQGVLSATILYEILLGKATLYAVLVSALVLMAMVKRKDSRGRAKRSGSGATNFSLLKQAGDVEENPGPTSATMDWIWRILFLVGAATGAHSGPQVQLQESGGGLAQAGGSLRLSCAASGRTFSMGWFRQAPGKEREFVAAITYSGGSPYYASSVRGRFTISRDNAKNTVYLQMNSLKPEDTAVYYCAANPTYGSDWNAENWGQGTQVTVSSGSGGGGSGGGGSGGGGSFEVQLVESGGGLVQPGGSLRLSCAASGFNIKDTYIHWVRQAPGKGLEWVARIYPTNGYTRYADSVKGRFTISADTSKNTAYLQMNSLRAEDTAVYYCSRWGGWGFYAMDYWGQGTLVTVSSTRIQNPDPAVYQLRDSKSSDKSVCLFTDFDSQTNVSQSKDSDVYITDKCVLDMRSMDFKSNSAVAWSNKSDFACANAFNNSIIPEDTFFPSSDVPCDVKLVEKSFETDTNLNFQNLSVIGFRILLLKVAGFNLLMTLRLWSSRAKRSGSGVKQTLNFDLLKLAGDVESNPGPSRGHMTEYKPTVRLATRDDVPRAVRTLAAAFADYPATRHTVDPDRHIERVTELQELFLTRVGLDIGKVWVADDGAAVAVWTTPESVEAGAVFAEIGPRMAELSGSRLAAQQQMEGLLAPHRPKEPAWFLATVGVSPDHQGKGLGSAVVLPGVEAAERAGVPAFLETSAPRNLPFYERLGFTVTADVEVPEGPRTWCMTRKPGA

SEQ ID NO: 23019 - protein, 993 aa, Artificial Sequence
  Synthetic Polypeptide
MALPVTALLLPLALLLHAARPDIQMTQSPSSLSASVGDRVTITCKASDHINNWLAWYQQKPGQAPKLLIYGATTLETGVPSRFSGSGSGTDYTLTISSLQPEDFATYYCQQSWNTPWTFGQGTKLEIKRLEIQNPDPAVYQLRDSKSSDKSVCLFTDFDSQTNVSQSKDSDVYITDKCVLDMRSMDFKSNSAVAWSNKSDFACANAFNNSIIPEDTFFPSSDVPCDVKLVEKSFETDTNLNFQNLSVIGFRILLLKVAGFNLLMTLRLWSSRAKRSGSGVKQTLNFDLLKLAGDVESNPGPTSATMDWIWRILFLVGAATGAHSGPQVQLQESGGGLAQAGGSLRLSCAASGRTFSMGWFRQAPGKEREFVAAITYSGGSPYYASSVRGRFTISRDNAKNTVYLQMNSLKPEDTAVYYCAANPTYGSDWNAENWGQGTQVTVSSGSGGGGSGGGGSGGGGSFEVQLVESGGGLVQPGGSLRLSCAASGFNIKDTYIHWVRQAPGKGLEWVARIYPTNGYTRYADSVKGRFTISADTSKNTAYLQMNSLRAEDTAVYYCSRWGGWGFYAMDYWGQGTLVTVSSTREDLKNVFPPEVAVFEPSKAEIAHTQKATLVCLATGFYPDHVELSWWVNGKEVHSGVCTDPQPLKEQPALNDSRYCLSSRLRVSATFWQNPRNHFRCQVQFYGLSENDEWTQDRAKPVTQIVSAEAWGRADCGITSASYHQGVLSATILYEILLGKATLYAVLVSALVLMAMVKRKDSRGRAKRSGSGATNFSLLKQAGDVEENPGPSRGHMTEYKPTVRLATRDDVPRAVRTLAAAFADYPATRHTVDPDRHIERVTELQELFLTRVGLDIGKVWVADDGAAVAVWTTPESVEAGAVFAEIGPRMAELSGSRLAAQQQMEGLLAPHRPKEPAWFLATVGVSPDHQGKGLGSAVVLPGVEAAERAGVPAFLETSAPRNLPFYERLGFTVTADVEVPEGPRTWCMTRKPGA

SEQ ID NO: 23020 - protein, 1000 aa, Artificial Sequence
  Synthetic Polypeptide
MTIRLLCYMGFYFLGAGLMEADIYQTPRYLVIGTGKKITLECSQTMGHDKMYWYQQDPGMELHLIHYSYGVNSTEKGDLSSESTVSRIRTEHFPLTLESARPSHTSQYLCASSEARGLAEFTDTQYFGPGTRLTVLEDLKNVFPPEVAVFEPSEAEISHTQKATLVCLATGFYPDHVELSWWVNGKEVHSGVCTDPQPLKEQPALNDSRYCLSSRLRVSATFWQNPRNHFRCQVQFYGLSENDEWTQDRAKPVTQIVSAEAWGRADCGFTSESYQQGVLSATILYEILLGKATLYAVLVSALVLMAMVKRKDSRGRAKRSGSGATNFSLLKQAGDVEENPGPTSATMDWIWRILFLVGAATGAHSGPQVQLQESGGGLAQAGGSLRLSCAASGRTFSMGWFRQAPGKEREFVAAITYSGGSPYYASSVRGRFTISRDNAKNTVYLQMNSLKPEDTAVYYCAANPTYGSDWNAENWGQGTQVTVSSGSGGGGSGGGGSGGGGSFEQVQLQQPGAELVKPGASVKMSCKASGYAFSSYWINWMKQKPGQGLEWIGQIYPGDGDTNYNGKFKGRATLTADTSSSTAYMQLSSLTSEDSAVYFCARSITTVVGCAMDYWGQGTSVTVSSTRIQNPDPAVYQLRDSKSSDKSVCLFTDFDSQTNVSQSKDSDVYITDKCVLDMRSMDFKSNSAVAWSNKSDFACANAFNNSIIPEDTFFPSPESSCDVKLVEKSFETDTNLNFQNLSVIGFRILLLKVAGFNLLMTLRLWSSRAKRSGSGVKQTLNFDLLKLAGDVESNPGPSRGHMTEYKPTVRLATRDDVPRAVRTLAAAFADYPATRHTVDPDRHIERVTELQELFLTRVGLDIGKVWVADDGAAVAVWTTPESVEAGAVFAEIGPRMAELSGSRLAAQQQMEGLLAPHRPKEPAWFLATVGVSPDHQGKGLGSAVVLPGVEAAERAGVPAFLETSAPRNLPFYERLGFTVTADVEVPEGPRTWCMTRKPGA

SEQ ID NO: 23021 - protein, 1123 aa, Artificial Sequence
  Synthetic Polypeptide
MALPVTALLLPLALLLHAARPACEVQLLESGGGLIQPGGSLRLSCAASGFTFSSHAMTWVRQAPGKGLEWVSAISGSGDYTHYADSVKGRFTISRDNSKNTVYLQMNSLRAEDSAVYYCAKDEDGGSLLGHRGQGTLVTVSSGTGGGGSGGGGSGGGGSEFDIQMTQSPSSLSASVGDRVTITCKASDHINNWLAWYQQKPGQAPKLLIYGATTLETGVPSRFSGSGSGTDYTLTISSLQPEDFATYYCQQSWNTPWTFGQGTKLEIKRLEDLKNVFPPEVAVFEPSEAEISHTQKATLVCLATGFYPDHVELSWWVNGKEVHSGVCTDPQPLKEQPALNDSRYCLSSRLRVSATFWQNPRNHFRCQVQFYGLSENDEWTQDRAKPVTQIVSAEAWGRADCGFTSESYQQGVLSATILYEILLGKATLYAVLVSALVLMAMVKRKDSRGRAKRSGSGATNFSLLKQAGDVEENPGPTSATMDWIWRILFLVGAATGAHSGPEVQLVESGGGLVQAGGSLRLSCAASGRTFSMGWFRQAPGKEREFVAAITYSGGSPYYADSVKGRFTISRDNAKNTVYLQMNSLKPEDTAVYYCAANPTYGSDWNAENWGQGTQVTVSSGSGGGGSGGGGSGGGGSFEQKEVEQNSGPLSVPEGAIASLNCTYSDRGSQSFFWYRQYSGKSPELIMSIYSNGDKEDGRFTAQLNKASQYVSLLIRDSQPSDSATYLCAVNSQSGVALNFGKGTSLLVTPHIQNPDPAVYQLRDSKSSDKSVCLFTDFDSQTNVSQSKDSDVYITDKCVLDMRSMDFKSNSAVAWSNKSDFACANAFNNSIIPEDTFFPSPESSCDVKLVEKSFETDTNLNFQNLSVIGFRILLLKVAGFNLLMTLRLWSSRAKRSGSGVKQTLNFDLLKLAGDVESNPGPSRGHMTEYKPTVRLATRDDVPRAVRTLAAAFADYPATRHTVDPDRHIERVTELQELFLTRVGLDIGKVWVADDGAAVAVWTTPESVEAGAVFAEIGPRMAELSGSRLAAQQQMEGLLAPHRPKEPAWFLATVGVSPDHQGKGLGSAVVLPGVEAAERAGVPAFLETSAPRNLPFYERLGFTVTADVEVPEGPRTWCMTRKPGA

SEQ ID NO: 23022 - protein, 863 aa, Artificial Sequence
  Synthetic Polypeptide
MALPVTALLLPLALLLHAARPDIQMTQSPSSLSASVGDRVTITCKASDHINNWLAWYQQKPGQAPKLLIYGATTLETGVPSRFSGSGSGTDYTLTISSLQPEDFATYYCQQSWNTPWTFGQGTKLEIKRLEGQPKANPTVTLFPPSSEELQANKATLVCLISDFYPGAVTVAWKADGSPVKAGVETTKPSKQSNNKYAASSYLSLTPEQWKSHRSYSCQVTHEGSTVEKTVAPTECSPIKTDVITMDPKDNCSKDANDTLLLQLTNTSAYYMYLLLLLKSVVYFAIITCCLLRRTAFCCNGEKSRAKRSGSGATNFSLLKQAGDVEENPGPTSMDWIWRILFLVGAATGAHSFEQVQLQQPGAELVKPGASVKMSCKASGYAFSSYWINWMKQKPGQGLEWIGQIYPGDGDTNYNGKFKGRATLTADTSSSTAYMQLSSLTSEDSAVYFCARSITTVVGCAMDYWGQGTSVTVSSTRSQPHTKPSVFVMKNGTNVACLVKEFYPKDIRINLVSSKKITEFDPAIVISPSGKYNAVKLGKYEDSNSVTCSVQHDNKTVHSTDFEVKTDSTDHVKPKETENTKQPSKSCHKPKAIVHTEKVNMMSLTVLGLRMLFAKTVAVNFLLTAKLFFLRAKRSGSGVKQTLNFDLLKLAGDVESNPGPSRGHMTEYKPTVRLATRDDVPRAVRTLAAAFADYPATRHTVDPDRHIERVTELQELFLTRVGLDIGKVWVADDGAAVAVWTTPESVEAGAVFAEIGPRMAELSGSRLAAQQQMEGLLAPHRPKEPAWFLATVGVSPDHQGKGLGSAVVLPGVEAAERAGVPAFLETSAPRNLPFYERLGFTVTADVEVPEGPRTWCMTRKPGA

SEQ ID NO: 23023 - protein, 9 aa, Artificial Sequence
  Synthetic Polypeptide
GGGGGGGGG

SEQ ID NO: 23024 - protein, 1039 aa, Artificial Sequence
  Synthetic Polypeptide
MALPVTALLLPLALLLHAARPACPYINIYNAEPANPSEKNSPTQYAYGTGGGGSGGGGSGGGGSEFDIQMTQSPSSLSASVGDRVTITCKASDHINNWLAWYQQKPGQAPKLLIYGATTLETGVPSRFSGSGSGTDYTLTISSLQPEDFATYYCQQSWNTPWTFGQGTKLEIKRLEDLKNVFPPEVAVFEPSKAEIAHTQKATLVCLATGFYPDHVELSWWVNGKEVHSGVCTDPQPLKEQPALNDSRYCLSSRLRVSATFWQNPRNHFRCQVQFYGLSENDEWTQDRAKPVTQIVSAEAWGRADCGITSASYHQGVLSATILYEILLGKATLYAVLVSALVLMAMVKRKDSRGRAKRSGSGATNFSLLKQAGDVEENPGPTSATMDWIWRILFLVGAATGAHSGPQVQLQESGGGLAQAGGSLRLSCAASGRTFSMGWFRQAPGKEREFVAAITYSGGSPYYASSVRGRFTISRDNAKNTVYLQMNSLKPEDTAVYYCAANPTYGSDWNAENWGQGTQVTVSSGSGGGGSGGGGSGGGGSFEQVQLQQPGAELVKPGASVKMSCKASGYAFSSYWINWMKQKPGQGLEWIGQIYPGDGDTNYNGKFKGRATLTADTSSSTAYMQLSSLTSEDSAVYFCARSITTVVGCAMDYWGQGTSVTVSSTRIQNPDPAVYQLRDSKSSDKSVCLFTDFDSQTNVSQSKDSDVYITDKCVLDMRSMDFKSNSAVAWSNKSDFACANAFNNSIIPEDTFFPSSDVPCDVKLVEKSFETDTNLNFQNLSVIGFRILLLKVAGFNLLMTLRLWSSRAKRSGSGVKQTLNFDLLKLAGDVESNPGPSRGHMTEYKPTVRLATRDDVPRAVRTLAAAFADYPATRHTVDPDRHIERVTELQELFLTRVGLDIGKVWVADDGAAVAVWTTPESVEAGAVFAEIGPRMAELSGSRLAAQQQMEGLLAPHRPKEPAWFLATVGVSPDHQGKGLGSAVVLPGVEAAERAGVPAFLETSAPRNLPFYERLGFTVTADVEVPEGPRTWCMTRKPGA

SEQ ID NO: 23025 - protein, 1028 aa, Artificial Sequence
  Synthetic Polypeptide
MALPVTALLLPLALLLHAARPACPQLGPYELWELSHGTGGGGSGGGGSGGGGSEFDIQMTQSPSSLSASVGDRVTITCKASDHINNWLAWYQQKPGQAPKLLIYGATTLETGVPSRFSGSGSGTDYTLTISSLQPEDFATYYCQQSWNTPWTFGQGTKLEIKRLEDLKNVFPPEVAVFEPSKAEIAHTQKATLVCLATGFYPDHVELSWWVNGKEVHSGVCTDPQPLKEQPALNDSRYCLSSRLRVSATFWQNPRNHFRCQVQFYGLSENDEWTQDRAKPVTQIVSAEAWGRADCGITSASYHQGVLSATILYEILLGKATLYAVLVSALVLMAMVKRKDSRGRAKRSGSGATNFSLLKQAGDVEENPGPTSATMDWIWRILFLVGAATGAHSGPQVQLQESGGGLAQAGGSLRLSCAASGRTFSMGWFRQAPGKEREFVAAITYSGGSPYYASSVRGRFTISRDNAKNTVYLQMNSLKPEDTAVYYCAANPTYGSDWNAENWGQGTQVTVSSGSGGGGSGGGGSGGGGSFEQVQLQQPGAELVKPGASVKMSCKASGYAFSSYWINWMKQKPGQGLEWIGQIYPGDGDTNYNGKFKGRATLTADTSSSTAYMQLSSLTSEDSAVYFCARSITTVVGCAMDYWGQGTSVTVSSTRIQNPDPAVYQLRDSKSSDKSVCLFTDFDSQTNVSQSKDSDVYITDKCVLDMRSMDFKSNSAVAWSNKSDFACANAFNNSIIPEDTFFPSSDVPCDVKLVEKSFETDTNLNFQNLSVIGFRILLLKVAGFNLLMTLRLWSSRAKRSGSGVKQTLNFDLLKLAGDVESNPGPSRGHMTEYKPTVRLATRDDVPRAVRTLAAAFADYPATRHTVDPDRHIERVTELQELFLTRVGLDIGKVWVADDGAAVAVWTTPESVEAGAVFAEIGPRMAELSGSRLAAQQQMEGLLAPHRPKEPAWFLATVGVSPDHQGKGLGSAVVLPGVEAAERAGVPAFLETSAPRNLPFYERLGFTVTADVEVPEGPRTWCMTRKPGA

SEQ ID NO: 23026 - protein, 888 aa, Artificial Sequence
  Synthetic Polypeptide
MALPVTALLLPLALLLHAARPDIQMTQSPSSLSASVGDRVTITCKASDHINNWLAWYQQKPGQAPKLLIYGATTLETGVPSRFSGSGSGTDYTLTISSLQPEDFATYYCQQSWNTPWTFGQGTKLEIKRLEDLKNVFPPEVAVFEPSEAEISHTQKATLVCLATGFYPDHVELSWWVNGKEVHSGVCTDPQPLKEQPALNDSRYCLSSRLRVSATFWQNPRNHFRCQVQFYGLSENDEWTQDRAKPVTQIVSAEAWGRADCGFTSESYQQGVLSATILYEILLGKATLYAVLVSALVLMAMVKRKDSRGRAKRSGSGATNFSLLKQAGDVEENPGPTSATMDWIWRILFLVGAATGAHSGPQLGPYELWELSHGSGGGGSGGGGSGGGGSFEQVQLQQPGAELVKPGASVKMSCKASGYAFSSYWINWMKQKPGQGLEWIGQIYPGDGDTNYNGKFKGRATLTADTSSSTAYMQLSSLTSEDSAVYFCARSITTVVGCAMDYWGQGTSVTVSSTRIQNPDPAVYQLRDSKSSDKSVCLFTDFDSQTNVSQSKDSDVYITDKCVLDMRSMDFKSNSAVAWSNKSDFACANAFNNSIIPEDTFFPSPESSCDVKLVEKSFETDTNLNFQNLSVIGFRILLLKVAGFNLLMTLRLWSSRAKRSGSGVKQTLNFDLLKLAGDVESNPGPSRGHMTEYKPTVRLATRDDVPRAVRTLAAAFADYPATRHTVDPDRHIERVTELQELFLTRVGLDIGKVWVADDGAAVAVWTTPESVEAGAVFAEIGPRMAELSGSRLAAQQQMEGLLAPHRPKEPAWFLATVGVSPDHQGKGLGSAVVLPGVEAAERAGVPAFLETSAPRNLPFYERLGFTVTADVEVPEGPRTWCMTRKPGA

SEQ ID NO: 23027 - protein, 1027 aa, Artificial Sequence
  Synthetic Polypeptide
MALPVTALLLPLALLLHAARPACSACPYSNPSLCSGTGGGGSGGGGSGGGGSEFDIQMTQSPSSLSASVGDRVTITCKASDHINNWLAWYQQKPGQAPKLLIYGATTLETGVPSRFSGSGSGTDYTLTISSLQPEDFATYYCQQSWNTPWTFGQGTKLEIKRLEDLKNVFPPEVAVFEPSKAEIAHTQKATLVCLATGFYPDHVELSWWVNGKEVHSGVCTDPQPLKEQPALNDSRYCLSSRLRVSATFWQNPRNHFRCQVQFYGLSENDEWTQDRAKPVTQIVSAEAWGRADCGITSASYHQGVLSATILYEILLGKATLYAVLVSALVLMAMVKRKDSRGRAKRSGSGATNFSLLKQAGDVEENPGPTSATMDWIWRILFLVGAATGAHSGPQVQLQESGGGLAQAGGSLRLSCAASGRTFSMGWFRQAPGKEREFVAAITYSGGSPYYASSVRGRFTISRDNAKNTVYLQMNSLKPEDTAVYYCAANPTYGSDWNAENWGQGTQVTVSSGSGGGGSGGGGSGGGGSFEQVQLQQPGAELVKPGASVKMSCKASGYAFSSYWINWMKQKPGQGLEWIGQIYPGDGDTNYNGKFKGRATLTADTSSSTAYMQLSSLTSEDSAVYFCARSITTVVGCAMDYWGQGTSVTVSSTRIQNPDPAVYQLRDSKSSDKSVCLFTDFDSQTNVSQSKDSDVYITDKCVLDMRSMDFKSNSAVAWSNKSDFACANAFNNSIIPEDTFFPSSDVPCDVKLVEKSFETDTNLNFQNLSVIGFRILLLKVAGFNLLMTLRLWSSRAKRSGSGVKQTLNFDLLKLAGDVESNPGPSRGHMTEYKPTVRLATRDDVPRAVRTLAAAFADYPATRHTVDPDRHIERVTELQELFLTRVGLDIGKVWVADDGAAVAVWTTPESVEAGAVFAEIGPRMAELSGSRLAAQQQMEGLLAPHRPKEPAWFLATVGVSPDHQGKGLGSAVVLPGVEAAERAGVPAFLETSAPRNLPFYERLGFTVTADVEVPEGPRTWCMTRKPGA

SEQ ID NO: 23028 - protein, 1033 aa, Artificial Sequence
  Synthetic Polypeptide
MALPVTALLLPLALLLHAARPACPYINIYNAEPANPSEKNSPTQYAYGTGAIGFLRTAEFDIQMTQSPSSLSASVGDRVTITCKASDHINNWLAWYQQKPGQAPKLLIYGATTLETGVPSRFSGSGSGTDYTLTISSLQPEDFATYYCQQSWNTPWTFGQGTKLEIKRLEDLKNVFPPEVAVFEPSKAEIAHTQKATLVCLATGFYPDHVELSWWVNGKEVHSGVCTDPQPLKEQPALNDSRYCLSSRLRVSATFWQNPRNHFRCQVQFYGLSENDEWTQDRAKPVTQIVSAEAWGRADCGITSASYHQGVLSATILYEILLGKATLYAVLVSALVLMAMVKRKDSRGRAKRSGSGATNFSLLKQAGDVEENPGPTSATMDWIWRILFLVGAATGAHSGPQVQLQESGGGLAQAGGSLRLSCAASGRTFSMGWFRQAPGKEREFVAAITYSGGSPYYASSVRGRFTISRDNAKNTVYLQMNSLKPEDTAVYYCAANPTYGSDWNAENWGQGTQVTVSSGSGGGGSGGGGSGGGGSFEQVQLQQPGAELVKPGASVKMSCKASGYAFSSYWINWMKQKPGQGLEWIGQIYPGDGDTNYNGKFKGRATLTADTSSSTAYMQLSSLTSEDSAVYFCARSITTVVGCAMDYWGQGTSVTVSSTRIQNPDPAVYQLRDSKSSDKSVCLFTDFDSQTNVSQSKDSDVYITDKCVLDMRSMDFKSNSAVAWSNKSDFACANAFNNSIIPEDTFFPSSDVPCDVKLVEKSFETDTNLNFQNLSVIGFRILLLKVAGFNLLMTLRLWSSRAKRSGSGVKQTLNFDLLKLAGDVESNPGPSRGHMTEYKPTVRLATRDDVPRAVRTLAAAFADYPATRHTVDPDRHIERVTELQELFLTRVGLDIGKVWVADDGAAVAVWTTPESVEAGAVFAEIGPRMAELSGSRLAAQQQMEGLLAPHRPKEPAWFLATVGVSPDHQGKGLGSAVVLPGVEAAERAGVPAFLETSAPRNLPFYERLGFTVTADVEVPEGPRTWCMTRKPGA

SEQ ID NO: 23029 - protein, 1037 aa, Artificial Sequence
  Synthetic Polypeptide
MALPVTALLLPLALLLHAARPACPYINIYNAEPANPSEKNSPTQYAYGTGPQGIFGQPGYINEFDIQMTQSPSSLSASVGDRVTITCKASDHINNWLAWYQQKPGQAPKLLIYGATTLETGVPSRFSGSGSGTDYTLTISSLQPEDFATYYCQQSWNTPWTFGQGTKLEIKRLEDLKNVFPPEVAVFEPSKAEIAHTQKATLVCLATGFYPDHVELSWWVNGKEVHSGVCTDPQPLKEQPALNDSRYCLSSRLRVSATFWQNPRNHFRCQVQFYGLSENDEWTQDRAKPVTQIVSAEAWGRADCGITSASYHQGVLSATILYEILLGKATLYAVLVSALVLMAMVKRKDSRGRAKRSGSGATNFSLLKQAGDVEENPGPTSATMDWIWRILFLVGAATGAHSGPQVQLQESGGGLAQAGGSLRLSCAASGRTFSMGWFRQAPGKEREFVAAITYSGGSPYYASSVRGRFTISRDNAKNTVYLQMNSLKPEDTAVYYCAANPTYGSDWNAENWGQGTQVTVSSGSGGGGSGGGGSGGGGSFEQVQLQQPGAELVKPGASVKMSCKASGYAFSSYWINWMKQKPGQGLEWIGQIYPGDGDTNYNGKFKGRATLTADTSSSTAYMQLSSLTSEDSAVYFCARSITTVVGCAMDYWGQGTSVTVSSTRIQNPDPAVYQLRDSKSSDKSVCLFTDFDSQTNVSQSKDSDVYITDKCVLDMRSMDFKSNSAVAWSNKSDFACANAFNNSIIPEDTFFPSSDVPCDVKLVEKSFETDTNLNFQNLSVIGFRILLLKVAGFNLLMTLRLWSSRAKRSGSGVKQTLNFDLLKLAGDVESNPGPSRGHMTEYKPTVRLATRDDVPRAVRTLAAAFADYPATRHTVDPDRHIERVTELQELFLTRVGLDIGKVWVADDGAAVAVWTTPESVEAGAVFAEIGPRMAELSGSRLAAQQQMEGLLAPHRPKEPAWFLATVGVSPDHQGKGLGSAVVLPGVEAAERAGVPAFLETSAPRNLPFYERLGFTVTADVEVPEGPRTWCMTRKPGA

SEQ ID NO: 23030 - protein, 1031 aa, Artificial Sequence
  Synthetic Polypeptide
MALPVTALLLPLALLLHAARPACPYINIYNAEPANPSEKNSPTQYAYGTGAVVRGAEFDIQMTQSPSSLSASVGDRVTITCKASDHINNWLAWYQQKPGQAPKLLIYGATTLETGVPSRFSGSGSGTDYTLTISSLQPEDFATYYCQQSWNTPWTFGQGTKLEIKRLEDLKNVFPPEVAVFEPSKAEIAHTQKATLVCLATGFYPDHVELSWWVNGKEVHSGVCTDPQPLKEQPALNDSRYCLSSRLRVSATFWQNPRNHFRCQVQFYGLSENDEWTQDRAKPVTQIVSAEAWGRADCGITSASYHQGVLSATILYEILLGKATLYAVLVSALVLMAMVKRKDSRGRAKRSGSGATNFSLLKQAGDVEENPGPTSATMDWIWRILFLVGAATGAHSGPQVQLQESGGGLAQAGGSLRLSCAASGRTFSMGWFRQAPGKEREFVAAITYSGGSPYYASSVRGRFTISRDNAKNTVYLQMNSLKPEDTAVYYCAANPTYGSDWNAENWGQGTQVTVSSGSGGGGSGGGGSGGGGSFEQVQLQQPGAELVKPGASVKMSCKASGYAFSSYWINWMKQKPGQGLEWIGQIYPGDGDTNYNGKFKGRATLTADTSSSTAYMQLSSLTSEDSAVYFCARSITTVVGCAMDYWGQGTSVTVSSTRIQNPDPAVYQLRDSKSSDKSVCLFTDFDSQTNVSQSKDSDVYITDKCVLDMRSMDFKSNSAVAWSNKSDFACANAFNNSIIPEDTFFPSSDVPCDVKLVEKSFETDTNLNFQNLSVIGFRILLLKVAGFNLLMTLRLWSSRAKRSGSGVKQTLNFDLLKLAGDVESNPGPSRGHMTEYKPTVRLATRDDVPRAVRTLAAAFADYPATRHTVDPDRHIERVTELQELFLTRVGLDIGKVWVADDGAAVAVWTTPESVEAGAVFAEIGPRMAELSGSRLAAQQQMEGLLAPHRPKEPAWFLATVGVSPDHQGKGLGSAVVLPGVEAAERAGVPAFLETSAPRNLPFYERLGFTVTADVEVPEGPRTWCMTRKPGA

SEQ ID NO: 23031 - protein, 1026 aa, Artificial Sequence
  Synthetic Polypeptide
MALPVTALLLPLALLLHAARPACPQLGPYELWELSHGTGPQGIFGQPGYINEFDIQMTQSPSSLSASVGDRVTITCKASDHINNWLAWYQQKPGQAPKLLIYGATTLETGVPSRFSGSGSGTDYTLTISSLQPEDFATYYCQQSWNTPWTFGQGTKLEIKRLEDLKNVFPPEVAVFEPSKAEIAHTQKATLVCLATGFYPDHVELSWWVNGKEVHSGVCTDPQPLKEQPALNDSRYCLSSRLRVSATFWQNPRNHFRCQVQFYGLSENDEWTQDRAKPVTQIVSAEAWGRADCGITSASYHQGVLSATILYEILLGKATLYAVLVSALVLMAMVKRKDSRGRAKRSGSGATNFSLLKQAGDVEENPGPTSATMDWIWRILFLVGAATGAHSGPQVQLQESGGGLAQAGGSLRLSCAASGRTFSMGWFRQAPGKEREFVAAITYSGGSPYYASSVRGRFTISRDNAKNTVYLQMNSLKPEDTAVYYCAANPTYGSDWNAENWGQGTQVTVSSGSGGGGSGGGGSGGGGSFEQVQLQQPGAELVKPGASVKMSCKASGYAFSSYWINWMKQKPGQGLEWIGQIYPGDGDTNYNGKFKGRATLTADTSSSTAYMQLSSLTSEDSAVYFCARSITTVVGCAMDYWGQGTSVTVSSTRIQNPDPAVYQLRDSKSSDKSVCLFTDFDSQTNVSQSKDSDVYITDKCVLDMRSMDFKSNSAVAWSNKSDFACANAFNNSIIPEDTFFPSSDVPCDVKLVEKSFETDTNLNFQNLSVIGFRILLLKVAGFNLLMTLRLWSSRAKRSGSGVKQTLNFDLLKLAGDVESNPGPSRGHMTEYKPTVRLATRDDVPRAVRTLAAAFADYPATRHTVDPDRHIERVTELQELFLTRVGLDIGKVWVADDGAAVAVWTTPESVEAGAVFAEIGPRMAELSGSRLAAQQQMEGLLAPHRPKEPAWFLATVGVSPDHQGKGLGSAVVLPGVEAAERAGVPAFLETSAPRNLPFYERLGFTVTADVEVPEGPRTWCMTRKPGA

SEQ ID NO: 23032 - protein, 1126 aa, Artificial Sequence
  Synthetic Polypeptide
MALPVTALLLPLALLLHAARPACEVQLLESGGGLIQPGGSLRLSCAASGFTFSSHAMTWVRQAPGKGLEWVSAISGSGDYTHYADSVKGRFTISRDNSKNTVYLQMNSLRAEDSAVYYCAKDEDGGSLLGHRGQGTLVTVSSGTGAVVRGAEFDIQMTQSPSSLSASVGDRVTITCKASDHINNWLAWYQQKPGQAPKLLIYGATTLETGVPSRFSGSGSGTDYTLTISSLQPEDFATYYCQQSWNTPWTFGQGTKLEIKRLEDLKNVFPPEVAVFEPSKAEIAHTQKATLVCLATGFYPDHVELSWWVNGKEVHSGVCTDPQPLKEQPALNDSRYCLSSRLRVSATFWQNPRNHFRCQVQFYGLSENDEWTQDRAKPVTQIVSAEAWGRADCGITSASYHQGVLSATILYEILLGKATLYAVLVSALVLMAMVKRKDSRGRAKRSGSGATNFSLLKQAGDVEENPGPTSATMDWIWRILFLVGAATGAHSGPEVQLVESGGGLVQAGGSLRLSCAASGRTFSMGWFRQAPGKEREFVAAITYSGGSPYYADSVKGRFTISRDNAKNTVYLQMNSLKPEDTAVYYCAANPTYGSDWNAENWGQGTQVTVSSGSGGGGSGGGGSGGGGSFEQVQLQQPGAELVKPGASVKMSCKASGYAFSSYWINWMKQKPGQGLEWIGQIYPGDGDTNYNGKFKGRATLTADTSSSTAYMQLSSLTSEDSAVYFCARSITTVVGCAMDYWGQGTSVTVSSTRIQNPDPAVYQLRDSKSSDKSVCLFTDFDSQTNVSQSKDSDVYITDKCVLDMRSMDFKSNSAVAWSNKSDFACANAFNNSIIPEDTFFPSPESSCDVKLVEKSFETDTNLNFQNLSVIGFRILLLKVAGFNLLMTLRLWSSRAKRSGSGVKQTLNFDLLKLAGDVESNPGPSRGHMTEYKPTVRLATRDDVPRAVRTLAAAFADYPATRHTVDPDRHIERVTELQELFLTRVGLDIGKVWVADDGAAVAVWTTPESVEAGAVFAEIGPRMAELSGSRLAAQQQMEGLLAPHRPKEPAWFLATVGVSPDHQGKGLGSAVVLPGVEAAERAGVPAFLETSAPRNLPFYERLGFTVTADVEVPEGPRTWCMTRKPGA

SEQ ID NO: 23033 - protein, 1027 aa, Artificial Sequence
  Synthetic Polypeptide
MALPVTALLLPLALLLHAARPACQDKLTQWPKWLEGTGGGGSGGGGSGGGGSEFDIQMTQSPSSLSASVGDRVTITCKASDHINNWLAWYQQKPGQAPKLLIYGATTLETGVPSRFSGSGSGTDYTLTISSLQPEDFATYYCQQSWNTPWTFGQGTKLEIKRLEDLKNVFPPEVAVFEPSKAEIAHTQKATLVCLATGFYPDHVELSWWVNGKEVHSGVCTDPQPLKEQPALNDSRYCLSSRLRVSATFWQNPRNHFRCQVQFYGLSENDEWTQDRAKPVTQIVSAEAWGRADCGITSASYHQGVLSATILYEILLGKATLYAVLVSALVLMAMVKRKDSRGRAKRSGSGATNFSLLKQAGDVEENPGPTSATMDWIWRILFLVGAATGAHSGPQVQLQESGGGLAQAGGSLRLSCAASGRTFSMGWFRQAPGKEREFVAAITYSGGSPYYASSVRGRFTISRDNAKNTVYLQMNSLKPEDTAVYYCAANPTYGSDWNAENWGQGTQVTVSSGSGGGGSGGGGSGGGGSFEQVQLQQPGAELVKPGASVKMSCKASGYAFSSYWINWMKQKPGQGLEWIGQIYPGDGDTNYNGKFKGRATLTADTSSSTAYMQLSSLTSEDSAVYFCARSITTVVGCAMDYWGQGTSVTVSSTRIQNPDPAVYQLRDSKSSDKSVCLFTDFDSQTNVSQSKDSDVYITDKCVLDMRSMDFKSNSAVAWSNKSDFACANAFNNSIIPEDTFFPSSDVPCDVKLVEKSFETDTNLNFQNLSVIGFRILLLKVAGFNLLMTLRLWSSRAKRSGSGVKQTLNFDLLKLAGDVESNPGPSRGHMTEYKPTVRLATRDDVPRAVRTLAAAFADYPATRHTVDPDRHIERVTELQELFLTRVGLDIGKVWVADDGAAVAVWTTPESVEAGAVFAEIGPRMAELSGSRLAAQQQMEGLLAPHRPKEPAWFLATVGVSPDHQGKGLGSAVVLPGVEAAERAGVPAFLETSAPRNLPFYERLGFTVTADVEVPEGPRTWCMTRKPGA

SEQ ID NO: 23034 - protein, 888 aa, Artificial Sequence
  Synthetic Polypeptide
MALPVTALLLPLALLLHAARPDIQMTQSPSSLSASVGDRVTITCKASDHINNWLAWYQQKPGQAPKLLIYGATTLETGVPSRFSGSGSGTDYTLTISSLQPEDFATYYCQQSWNTPWTFGQGTKLEIKRLEDLKNVFPPEVAVFEPSEAEISHTQKATLVCLATGFYPDHVELSWWVNGKEVHSGVCTDPQPLKEQPALNDSRYCLSSRLRVSATFWQNPRNHFRCQVQFYGLSENDEWTQDRAKPVTQIVSAEAWGRADCGFTSESYQQGVLSATILYEILLGKATLYAVLVSALVLMAMVKRKDSRGRAKRSGSGATNFSLLKQAGDVEENPGPTSATMDWIWRILFLVGAATGAHSGPSACPYSNPSLCSGSGGGGSGGGGSGGGGSFEQVQLQQPGAELVKPGASVKMSCKASGYAFSSYWINWMKQKPGQGLEWIGQIYPGDGDTNYNGKFKGRATLTADTSSSTAYMQLSSLTSEDSAVYFCARSITTVVGCAMDYWGQGTSVTVSSTRIQNPDPAVYQLRDSKSSDKSVCLFTDFDSQTNVSQSKDSDVYITDKCVLDMRSMDFKSNSAVAWSNKSDFACANAFNNSIIPEDTFFPSPESSCDVKLVEKSFETDTNLNFQNLSVIGFRILLLKVAGFNLLMTLRLWSSRAKRSGSGVKQTLNFDLLKLAGDVESNPGPSRGHMTEYKPTVRLATRDDVPRAVRTLAAAFADYPATRHTVDPDRHIERVTELQELFLTRVGLDIGKVWVADDGAAVAVWTTPESVEAGAVFAEIGPRMAELSGSRLAAQQQMEGLLAPHRPKEPAWFLATVGVSPDHQGKGLGSAVVLPGVEAAERAGVPAFLETSAPRNLPFYERLGFTVTADVEVPEGPRTWCMTRKPGA

SEQ ID NO: 23035 - protein, 1128 aa, Artificial Sequence
  Synthetic Polypeptide
MALPVTALLLPLALLLHAARPACEVQLLESGGGLIQPGGSLRLSCAASGFTFSSHAMTWVRQAPGKGLEWVSAISGSGDYTHYADSVKGRFTISRDNSKNTVYLQMNSLRAEDSAVYYCAKDEDGGSLLGHRGQGTLVTVSSGTGAIGFLRTAEFDIQMTQSPSSLSASVGDRVTITCKASDHINNWLAWYQQKPGQAPKLLIYGATTLETGVPSRFSGSGSGTDYTLTISSLQPEDFATYYCQQSWNTPWTFGQGTKLEIKRLEDLKNVFPPEVAVFEPSKAEIAHTQKATLVCLATGFYPDHVELSWWVNGKEVHSGVCTDPQPLKEQPALNDSRYCLSSRLRVSATFWQNPRNHFRCQVQFYGLSENDEWTQDRAKPVTQIVSAEAWGRADCGITSASYHQGVLSATILYEILLGKATLYAVLVSALVLMAMVKRKDSRGRAKRSGSGATNFSLLKQAGDVEENPGPTSATMDWIWRILFLVGAATGAHSGPEVQLVESGGGLVQAGGSLRLSCAASGRTFSMGWFRQAPGKEREFVAAITYSGGSPYYADSVKGRFTISRDNAKNTVYLQMNSLKPEDTAVYYCAANPTYGSDWNAENWGQGTQVTVSSGSGGGGSGGGGSGGGGSFEQVQLQQPGAELVKPGASVKMSCKASGYAFSSYWINWMKQKPGQGLEWIGQIYPGDGDTNYNGKFKGRATLTADTSSSTAYMQLSSLTSEDSAVYFCARSITTVVGCAMDYWGQGTSVTVSSTRIQNPDPAVYQLRDSKSSDKSVCLFTDFDSQTNVSQSKDSDVYITDKCVLDMRSMDFKSNSAVAWSNKSDFACANAFNNSIIPEDTFFPSPESSCDVKLVEKSFETDTNLNFQNLSVIGFRILLLKVAGFNLLMTLRLWSSRAKRSGSGVKQTLNFDLLKLAGDVESNPGPSRGHMTEYKPTVRLATRDDVPRAVRTLAAAFADYPATRHTVDPDRHIERVTELQELFLTRVGLDIGKVWVADDGAAVAVWTTPESVEAGAVFAEIGPRMAELSGSRLAAQQQMEGLLAPHRPKEPAWFLATVGVSPDHQGKGLGSAVVLPGVEAAERAGVPAFLETSAPRNLPFYERLGFTVTADVEVPEGPRTWCMTRKPGA

SEQ ID NO: 23036 - protein, 1132 aa, Artificial Sequence
  Synthetic Polypeptide
MALPVTALLLPLALLLHAARPACEVQLLESGGGLIQPGGSLRLSCAASGFTFSSHAMTWVRQAPGKGLEWVSAISGSGDYTHYADSVKGRFTISRDNSKNTVYLQMNSLRAEDSAVYYCAKDEDGGSLLGHRGQGTLVTVSSGTGPQGIFGQPGYINEFDIQMTQSPSSLSASVGDRVTITCKASDHINNWLAWYQQKPGQAPKLLIYGATTLETGVPSRFSGSGSGTDYTLTISSLQPEDFATYYCQQSWNTPWTFGQGTKLEIKRLEDLKNVFPPEVAVFEPSKAEIAHTQKATLVCLATGFYPDHVELSWWVNGKEVHSGVCTDPQPLKEQPALNDSRYCLSSRLRVSATFWQNPRNHFRCQVQFYGLSENDEWTQDRAKPVTQIVSAEAWGRADCGITSASYHQGVLSATILYEILLGKATLYAVLVSALVLMAMVKRKDSRGRAKRSGSGATNFSLLKQAGDVEENPGPTSATMDWIWRILFLVGAATGAHSGPEVQLVESGGGLVQAGGSLRLSCAASGRTFSMGWFRQAPGKEREFVAAITYSGGSPYYADSVKGRFTISRDNAKNTVYLQMNSLKPEDTAVYYCAANPTYGSDWNAENWGQGTQVTVSSGSGGGGSGGGGSGGGGSFEQVQLQQPGAELVKPGASVKMSCKASGYAFSSYWINWMKQKPGQGLEWIGQIYPGDGDTNYNGKFKGRATLTADTSSSTAYMQLSSLTSEDSAVYFCARSITTVVGCAMDYWGQGTSVTVSSTRIQNPDPAVYQLRDSKSSDKSVCLFTDFDSQTNVSQSKDSDVYITDKCVLDMRSMDFKSNSAVAWSNKSDFACANAFNNSIIPEDTFFPSPESSCDVKLVEKSFETDTNLNFQNLSVIGFRILLLKVAGFNLLMTLRLWSSRAKRSGSGVKQTLNFDLLKLAGDVESNPGPSRGHMTEYKPTVRLATRDDVPRAVRTLAAAFADYPATRHTVDPDRHIERVTELQELFLTRVGLDIGKVWVADDGAAVAVWTTPESVEAGAVFAEIGPRMAELSGSRLAAQQQMEGLLAPHRPKEPAWFLATVGVSPDHQGKGLGSAVVLPGVEAAERAGVPAFLETSAPRNLPFYERLGFTVTADVEVPEGPRTWCMTRKPGA

SEQ ID NO: 23037 - protein, 1020 aa, Artificial Sequence
  Synthetic Polypeptide
MALPVTALLLPLALLLHAARPACPQLGPYELWELSHGTGAVVRGAEFDIQMTQSPSSLSASVGDRVTITCKASDHINNWLAWYQQKPGQAPKLLIYGATTLETGVPSRFSGSGSGTDYTLTISSLQPEDFATYYCQQSWNTPWTFGQGTKLEIKRLEDLKNVFPPEVAVFEPSKAEIAHTQKATLVCLATGFYPDHVELSWWVNGKEVHSGVCTDPQPLKEQPALNDSRYCLSSRLRVSATFWQNPRNHFRCQVQFYGLSENDEWTQDRAKPVTQIVSAEAWGRADCGITSASYHQGVLSATILYEILLGKATLYAVLVSALVLMAMVKRKDSRGRAKRSGSGATNFSLLKQAGDVEENPGPTSATMDWIWRILFLVGAATGAHSGPQVQLQESGGGLAQAGGSLRLSCAASGRTFSMGWFRQAPGKEREFVAAITYSGGSPYYASSVRGRFTISRDNAKNTVYLQMNSLKPEDTAVYYCAANPTYGSDWNAENWGQGTQVTVSSGSGGGGSGGGGSGGGGSFEQVQLQQPGAELVKPGASVKMSCKASGYAFSSYWINWMKQKPGQGLEWIGQIYPGDGDTNYNGKFKGRATLTADTSSSTAYMQLSSLTSEDSAVYFCARSITTVVGCAMDYWGQGTSVTVSSTRIQNPDPAVYQLRDSKSSDKSVCLFTDFDSQTNVSQSKDSDVYITDKCVLDMRSMDFKSNSAVAWSNKSDFACANAFNNSIIPEDTFFPSSDVPCDVKLVEKSFETDTNLNFQNLSVIGFRILLLKVAGFNLLMTLRLWSSRAKRSGSGVKQTLNFDLLKLAGDVESNPGPSRGHMTEYKPTVRLATRDDVPRAVRTLAAAFADYPATRHTVDPDRHIERVTELQELFLTRVGLDIGKVWVADDGAAVAVWTTPESVEAGAVFAEIGPRMAELSGSRLAAQQQMEGLLAPHRPKEPAWFLATVGVSPDHQGKGLGSAVVLPGVEAAERAGVPAFLETSAPRNLPFYERLGFTVTADVEVPEGPRTWCMTRKPGA

SEQ ID NO: 23038 - protein, 881 aa, Artificial Sequence
  Synthetic Polypeptide
MALPVTALLLPLALLLHAARPDIQMTQSPSSLSASVGDRVTITCKASDHINNWLAWYQQKPGQAPKLLIYGATTLETGVPSRFSGSGSGTDYTLTISSLQPEDFATYYCQQSWNTPWTFGQGTKLEIKRLEDLKNVFPPEVAVFEPSEAEISHTQKATLVCLATGFYPDHVELSWWVNGKEVHSGVCTDPQPLKEQPALNDSRYCLSSRLRVSATFWQNPRNHFRCQVQFYGLSENDEWTQDRAKPVTQIVSAEAWGRADCGFTSESYQQGVLSATILYEILLGKATLYAVLVSALVLMAMVKRKDSRGRAKRSGSGATNFSLLKQAGDVEENPGPTSATMDWIWRILFLVGAATGAHSGPQLGPYELWELSHGSGPLGIAGIFEQVQLQQPGAELVKPGASVKMSCKASGYAFSSYWINWMKQKPGQGLEWIGQIYPGDGDTNYNGKFKGRATLTADTSSSTAYMQLSSLTSEDSAVYFCARSITTVVGCAMDYWGQGTSVTVSSTRIQNPDPAVYQLRDSKSSDKSVCLFTDFDSQTNVSQSKDSDVYITDKCVLDMRSMDFKSNSAVAWSNKSDFACANAFNNSIIPEDTFFPSPESSCDVKLVEKSFETDTNLNFQNLSVIGFRILLLKVAGFNLLMTLRLWSSRAKRSGSGVKQTLNFDLLKLAGDVESNPGPSRGHMTEYKPTVRLATRDDVPRAVRTLAAAFADYPATRHTVDPDRHIERVTELQELFLTRVGLDIGKVWVADDGAAVAVWTTPESVEAGAVFAEIGPRMAELSGSRLAAQQQMEGLLAPHRPKEPAWFLATVGVSPDHQGKGLGSAVVLPGVEAAERAGVPAFLETSAPRNLPFYERLGFTVTADVEVPEGPRTWCMTRKPGA

SEQ ID NO: 23039 - protein, 989 aa, Artificial Sequence
  Synthetic Polypeptide
MALPVTALLLPLALLLHAARPDIQMTQSPSSLSASVGDRVTITCKASDHINNWLAWYQQKPGQAPKLLIYGATTLETGVPSRFSGSGSGTDYTLTISSLQPEDFATYYCQQSWNTPWTFGQGTKLEIKRLEDLKNVFPPEVAVFEPSEAEISHTQKATLVCLATGFYPDHVELSWWVNGKEVHSGVCTDPQPLKEQPALNDSRYCLSSRLRVSATFWQNPRNHFRCQVQFYGLSENDEWTQDRAKPVTQIVSAEAWGRADCGFTSESYQQGVLSATILYEILLGKATLYAVLVSALVLMAMVKRKDSRGRAKRSGSGATNFSLLKQAGDVEENPGPTSATMDWIWRILFLVGAATGAHSGPEVQLVESGGGLVQAGGSLRLSCAASGRTFTMGWFRQAPGKEREFVAAISLSPTLAYYADSVKGRFTISRDNAKNTVVLQMNSLKPEDTALYYCAADRKSVMSIRPDYWGQGTQVTVSSGSALRRLLGLFGFEQVQLQQPGAELVKPGASVKMSCKASGYAFSSYWINWMKQKPGQGLEWIGQIYPGDGDTNYNGKFKGRATLTADTSSSTAYMQLSSLTSEDSAVYFCARSITTVVGCAMDYWGQGTSVTVSSTRIQNPDPAVYQLRDSKSSDKSVCLFTDFDSQTNVSQSKDSDVYITDKCVLDMRSMDFKSNSAVAWSNKSDFACANAFNNSIIPEDTFFPSPESSCDVKLVEKSFETDTNLNFQNLSVIGFRILLLKVAGFNLLMTLRLWSSRAKRSGSGVKQTLNFDLLKLAGDVESNPGPSRGHMTEYKPTVRLATRDDVPRAVRTLAAAFADYPATRHTVDPDRHIERVTELQELFLTRVGLDIGKVWVADDGAAVAVWTTPESVEAGAVFAEIGPRMAELSGSRLAAQQQMEGLLAPHRPKEPAWFLATVGVSPDHQGKGLGSAVVLPGVEAAERAGVPAFLETSAPRNLPFYERLGFTVTADVEVPEGPRTWCMTRKPGA

SEQ ID NO: 23040 - protein, 987 aa, Artificial Sequence
  Synthetic Polypeptide
MALPVTALLLPLALLLHAARPDIQMTQSPSSLSASVGDRVTITCKASDHINNWLAWYQQKPGQAPKLLIYGATTLETGVPSRFSGSGSGTDYTLTISSLQPEDFATYYCQQSWNTPWTFGQGTKLEIKRLEDLKNVFPPEVAVFEPSEAEISHTQKATLVCLATGFYPDHVELSWWVNGKEVHSGVCTDPQPLKEQPALNDSRYCLSSRLRVSATFWQNPRNHFRCQVQFYGLSENDEWTQDRAKPVTQIVSAEAWGRADCGFTSESYQQGVLSATILYEILLGKATLYAVLVSALVLMAMVKRKDSRGRAKRSGSGATNFSLLKQAGDVEENPGPTSATMDWIWRILFLVGAATGAHSGPEVQLVESGGGLVQAGGSLRLSCAASGRTFTMGWFRQAPGKEREFVAAISLSPTLAYYADSVKGRFTISRDNAKNTVVLQMNSLKPEDTALYYCAADRKSVMSIRPDYWGQGTQVTVSSGSGPLGIAGIFEQVQLQQPGAELVKPGASVKMSCKASGYAFSSYWINWMKQKPGQGLEWIGQIYPGDGDTNYNGKFKGRATLTADTSSSTAYMQLSSLTSEDSAVYFCARSITTVVGCAMDYWGQGTSVTVSSTRIQNPDPAVYQLRDSKSSDKSVCLFTDFDSQTNVSQSKDSDVYITDKCVLDMRSMDFKSNSAVAWSNKSDFACANAFNNSIIPEDTFFPSPESSCDVKLVEKSFETDTNLNFQNLSVIGFRILLLKVAGFNLLMTLRLWSSRAKRSGSGVKQTLNFDLLKLAGDVESNPGPSRGHMTEYKPTVRLATRDDVPRAVRTLAAAFADYPATRHTVDPDRHIERVTELQELFLTRVGLDIGKVWVADDGAAVAVWTTPESVEAGAVFAEIGPRMAELSGSRLAAQQQMEGLLAPHRPKEPAWFLATVGVSPDHQGKGLGSAVVLPGVEAAERAGVPAFLETSAPRNLPFYERLGFTVTADVEVPEGPRTWCMTRKPGA

SEQ ID NO: 23041 - protein, 1132 aa, Artificial Sequence; identical to SEQ ID NO: 23036
  Synthetic Polypeptide

SEQ ID NO: 23042 - protein, 883 aa, Artificial Sequence
  Synthetic Polypeptide
MALPVTALLLPLALLLHAARPDIQMTQSPSSLSASVGDRVTITCKASDHINNWLAWYQQKPGQAPKLLIYGATTLETGVPSRFSGSGSGTDYTLTISSLQPEDFATYYCQQSWNTPWTFGQGTKLEIKRLEDLKNVFPPEVAVFEPSEAEISHTQKATLVCLATGFYPDHVELSWWVNGKEVHSGVCTDPQPLKEQPALNDSRYCLSSRLRVSATFWQNPRNHFRCQVQFYGLSENDEWTQDRAKPVTQIVSAEAWGRADCGFTSESYQQGVLSATILYEILLGKATLYAVLVSALVLMAMVKRKDSRGRAKRSGSGATNFSLLKQAGDVEENPGPTSATMDWIWRILFLVGAATGAHSGPQLGPYELWELSHGSALRRLLGLFGFEQVQLQQPGAELVKPGASVKMSCKASGYAFSSYWINWMKQKPGQGLEWIGQIYPGDGDTNYNGKFKGRATLTADTSSSTAYMQLSSLTSEDSAVYFCARSITTVVGCAMDYWGQGTSVTVSSTRIQNPDPAVYQLRDSKSSDKSVCLFTDFDSQTNVSQSKDSDVYITDKCVLDMRSMDFKSNSAVAWSNKSDFACANAFNNSIIPEDTFFPSPESSCDVKLVEKSFETDTNLNFQNLSVIGFRILLLKVAGFNLLMTLRLWSSRAKRSGSGVKQTLNFDLLKLAGDVESNPGPSRGHMTEYKPTVRLATRDDVPRAVRTLAAAFADYPATRHTVDPDRHIERVTELQELFLTRVGLDIGKVWVADDGAAVAVWTTPESVEAGAVFAEIGPRMAELSGSRLAAQQQMEGLLAPHRPKEPAWFLATVGVSPDHQGKGLGSAVVLPGVEAAERAGVPAFLETSAPRNLPFYERLGFTVTADVEVPEGPRTWCMTRKPGA

SEQ ID NO: 23043 - protein, 888 aa, Artificial Sequence
  Synthetic Polypeptide
MALPVTALLLPLALLLHAARPDIQMTQSPSSLSASVGDRVTITCKASDHINNWLAWYQQKPGQAPKLLIYGATTLETGVPSRFSGSGSGTDYTLTISSLQPEDFATYYCQQSWNTPWTFGQGTKLEIKRLEDLKNVFPPEVAVFEPSEAEISHTQKATLVCLATGFYPDHVELSWWVNGKEVHSGVCTDPQPLKEQPALNDSRYCLSSRLRVSATFWQNPRNHFRCQVQFYGLSENDEWTQDRAKPVTQIVSAEAWGRADCGFTSESYQQGVLSATILYEILLGKATLYAVLVSALVLMAMVKRKDSRGRAKRSGSGATNFSLLKQAGDVEENPGPTSATMDWIWRILFLVGAATGAHSGPQDKLTQWPKWLEGSGGGGSGGGGSGGGGSFEQVQLQQPGAELVKPGASVKMSCKASGYAFSSYWINWMKQKPGQGLEWIGQIYPGDGDTNYNGKFKGRATLTADTSSSTAYMQLSSLTSEDSAVYFCARSITTVVGCAMDYWGQGTSVTVSSTRIQNPDPAVYQLRDSKSSDKSVCLFTDFDSQTNVSQSKDSDVYITDKCVLDMRSMDFKSNSAVAWSNKSDFACANAFNNSIIPEDTFFPSPESSCDVKLVEKSFETDTNLNFQNLSVIGFRILLLKVAGFNLLMTLRLWSSRAKRSGSGVKQTLNFDLLKLAGDVESNPGPSRGHMTEYKPTVRLATRDDVPRAVRTLAAAFADYPATRHTVDPDRHIERVTELQELFLTRVGLDIGKVWVADDGAAVAVWTTPESVEAGAVFAEIGPRMAELSGSRLAAQQQMEGLLAPHRPKEPAWFLATVGVSPDHQGKGLGSAVVLPGVEAAERAGVPAFLETSAPRNLPFYERLGFTVTADVEVPEGPRTWCMTRKPGA

SEQ ID NO: 23044 - protein, 1128 aa, Artificial Sequence; identical to SEQ ID NO: 23035
  Synthetic Polypeptide

SEQ ID NO: 23045 - protein, 946 aa, Artificial Sequence
  Synthetic Polypeptide
MALPVTALLLPLALLLHAARPDIQMTQSPSSLSASVGDRVTITCKASDHINNWLAWYQQKPGQAPKLLIYGATTLETGVPSRFSGSGSGTDYTLTISSLQPEDFATYYCQQSWNTPWTFGQGTKLEIKRLEDLKNVFPPEVAVFEPSEAEISHTQKATLVCLATGFYPDHVELSWWVNGKEVHSGVCTDPQPLKEQPALNDSRYCLSSRLRVSATFWQNPRNHFRCQVQFYGLSENDEWTQDRAKPVTQIVSAEAWGRADCGFTSESYQQGVLSATILYEILLGKATLYAVLVSALVLMAMVKRKDSRGRAKRSGSGATNFSLLKQAGDVEENPGPTSATMDWIWRILFLVGAATGAHSGPQDKLTQWPKWLEGGGGSELPTQGTFSNVSTNVSGGGGQDKLTQWPKWLEGGGGSELPTQGTFSNVSTNVSGSGGGGSGGGGSGGGGSFEQVQLQQPGAELVKPGASVKMSCKASGYAFSSYWINWMKQKPGQGLEWIGQIYPGDGDTNYNGKFKGRATLTADTSSSTAYMQLSSLTSEDSAVYFCARSITTVVGCAMDYWGQGTSVTVSSTRIQNPDPAVYQLRDSKSSDKSVCLFTDFDSQTNVSQSKDSDVYITDKCVLDMRSMDFKSNSAVAWSNKSDFACANAFNNSIIPEDTFFPSPESSCDVKLVEKSFETDTNLNFQNLSVIGFRILLLKVAGFNLLMTLRLWSSRAKRSGSGVKQTLNFDLLKLAGDVESNPGPSRGHMTEYKPTVRLATRDDVPRAVRTLAAAFADYPATRHTVDPDRHIERVTELQELFLTRVGLDIGKVWVADDGAAVAVWTTPESVEAGAVFAEIGPRMAELSGSRLAAQQQMEGLLAPHRPKEPAWFLATVGVSPDHQGKGLGSAVVLPGVEAAERAGVPAFLETSAPRNLPFYERLGFTVTADVEVPEGPRTWCMTRKPGA

SEQ ID NO: 23046 - protein, 1022 aa, Artificial Sequence
  Synthetic Polypeptide
MALPVTALLLPLALLLHAARPACPQLGPYELWELSHGTGAIGFLRTAEFDIQMTQSPSSLSASVGDRVTITCKASDHINNWLAWYQQKPGQAPKLLIYGATTLETGVPSRFSGSGSGTDYTLTISSLQPEDFATYYCQQSWNTPWTFGQGTKLEIKRLEDLKNVFPPEVAVFEPSKAEIAHTQKATLVCLATGFYPDHVELSWWVNGKEVHSGVCTDPQPLKEQPALNDSRYCLSSRLRVSATFWQNPRNHFRCQVQFYGLSENDEWTQDRAKPVTQIVSAEAWGRADCGITSASYHQGVLSATILYEILLGKATLYAVLVSALVLMAMVKRKDSRGRAKRSGSGATNFSLLKQAGDVEENPGPTSATMDWIWRILFLVGAATGAHSGPQVQLQESGGGLAQAGGSLRLSCAASGRTFSMGWFRQAPGKEREFVAAITYSGGSPYYASSVRGRFTISRDNAKNTVYLQMNSLKPEDTAVYYCAANPTYGSDWNAENWGQGTQVTVSSGSGGGGSGGGGSGGGGSFEQVQLQQPGAELVKPGASVKMSCKASGYAFSSYWINWMKQKPGQGLEWIGQIYPGDGDTNYNGKFKGRATLTADTSSSTAYMQLSSLTSEDSAVYFCARSITTVVGCAMDYWGQGTSVTVSSTRIQNPDPAVYQLRDSKSSDKSVCLFTDFDSQTNVSQSKDSDVYITDKCVLDMRSMDFKSNSAVAWSNKSDFACANAFNNSIIPEDTFFPSSDVPCDVKLVEKSFETDTNLNFQNLSVIGFRILLLKVAGFNLLMTLRLWSSRAKRSGSGVKQTLNFDLLKLAGDVESNPGPSRGHMTEYKPTVRLATRDDVPRAVRTLAAAFADYPATRHTVDPDRHIERVTELQELFLTRVGLDIGKVWVADDGAAVAVWTTPESVEAGAVFAEIGPRMAELSGSRLAAQQQMEGLLAPHRPKEPAWFLATVGVSPDHQGKGLGSAVVLPGVEAAERAGVPAFLETSAPRNLPFYERLGFTVTADVEVPEGPRTWCMTRKPGA

SEQ ID NO: 23047 - protein, 1020 aa, Artificial Sequence; identical to SEQ ID NO: 23037
  Synthetic Polypeptide

SEQ ID NO: 23048 - protein, 899 aa, Artificial Sequence
  Synthetic Polypeptide
MALPVTALLLPLALLLHAARPDIQMTQSPSSLSASVGDRVTITCKASDHINNWLAWYQQKPGQAPKLLIYGATTLETGVPSRFSGSGSGTDYTLTISSLQPEDFATYYCQQSWNTPWTFGQGTKLEIKRLEDLKNVFPPEVAVFEPSEAEISHTQKATLVCLATGFYPDHVELSWWVNGKEVHSGVCTDPQPLKEQPALNDSRYCLSSRLRVSATFWQNPRNHFRCQVQFYGLSENDEWTQDRAKPVTQIVSAEAWGRADCGFTSESYQQGVLSATILYEILLGKATLYAVLVSALVLMAMVKRKDSRGRAKRSGSGATNFSLLKQAGDVEENPGPTSATMDWIWRILFLVGAATGAHSGPYINIYNAEPANPSEKNSPTQYAYGSGGGGSGGGGSGGGGSFEQVQLQQPGAELVKPGASVKMSCKASGYAFSSYWINWMKQKPGQGLEWIGQIYPGDGDTNYNGKFKGRATLTADTSSSTAYMQLSSLTSEDSAVYFCARSITTVVGCAMDYWGQGTSVTVSSTRIQNPDPAVYQLRDSKSSDKSVCLFTDFDSQTNVSQSKDSDVYITDKCVLDMRSMDFKSNSAVAWSNKSDFACANAFNNSIIPEDTFFPSPESSCDVKLVEKSFETDTNLNFQNLSVIGFRILLLKVAGFNLLMTLRLWSSRAKRSGSGVKQTLNFDLLKLAGDVESNPGPSRGHMTEYKPTVRLATRDDVPRAVRTLAAAFADYPATRHTVDPDRHIERVTELQELFLTRVGLDIGKVWVADDGAAVAVWTTPESVEAGAVFAEIGPRMAELSGSRLAAQQQMEGLLAPHRPKEPAWFLATVGVSPDHQGKGLGSAVVLPGVEAAERAGVPAFLETSAPRNLPFYERLGFTVTADVEVPEGPRTWCMTRKPGA

SEQ ID NO: 23049 - protein, 961 aa, Artificial Sequence
  Synthetic Polypeptide
MALPVTALLLPLALLLHAARPDIQMTQSPSSLSASVGDRVTITCKASDHINNWLAWYQQKPGQAPKLLIYGATTLETGVPSRFSGSGSGTDYTLTISSLQPEDFATYYCQQSWNTPWTFGQGTKLEIKRLEDLKNVFPPEVAVFEPSEAEISHTQKATLVCLATGFYPDHVELSWWVNGKEVHSGVCTDPQPLKEQPALNDSRYCLSSRLRVSATFWQNPRNHFRCQVQFYGLSENDEWTQDRAKPVTQIVSAEAWGRADCGFTSESYQQGVLSATILYEILLGKATLYAVLVSALVLMAMVKRKDSRGRAKRSGSGATNFSLLKQAGDVEENPGPTSATMDWIWRILFLVGAATGAHSQLGPYELWELSHGSGSGSGSQLGPYELWELSHSGGGSGQLGPYELWELSHGSSGPGSGSCQFDLSTRRLKCGSGSCQFDLSTRRLKCGSGGGGSGGGGSGGGGSFEQVQLQQPGAELVKPGASVKMSCKASGYAFSSYWINWMKQKPGQGLEWIGQIYPGDGDTNYNGKFKGRATLTADTSSSTAYMQLSSLTSEDSAVYFCARSITTVVGCAMDYWGQGTSVTVSSTRIQNPDPAVYQLRDSKSSDKSVCLFTDFDSQTNVSQSKDSDVYITDKCVLDMRSMDFKSNSAVAWSNKSDFACANAFNNSIIPEDTFFPSPESSCDVKLVEKSFETDTNLNFQNLSVIGFRILLLKVAGFNLLMTLRLWSSRAKRSGSGVKQTLNFDLLKLAGDVESNPGPSRGHMTEYKPTVRLATRDDVPRAVRTLAAAFADYPATRHTVDPDRHIERVTELQELFLTRVGLDIGKVWVADDGAAVAVWTTPESVEAGAVFAEIGPRMAELSGSRLAAQQQMEGLLAPHRPKEPAWFLATVGVSPDHQGKGLGSAVVLPGVEAAERAGVPAFLETSAPRNLPFYERLGFTVTADVEVPEGPRTWCMTRKPGA

SEQ ID NO: 23050 - protein, 894 aa, Artificial Sequence
  Synthetic Polypeptide
MALPVTALLLPLALLLHAARPDIQMTQSPSSLSASVGDRVTITCKASDHINNWLAWYQQKPGQAPKLLIYGATTLETGVPSRFSGSGSGTDYTLTISSLQPEDFATYYCQQSWNTPWTFGQGTKLEIKRLEDLKNVFPPEVAVFEPSEAEISHTQKATLVCLATGFYPDHVELSWWVNGKEVHSGVCTDPQPLKEQPALNDSRYCLSSRLRVSATFWQNPRNHFRCQVQFYGLSENDEWTQDRAKPVTQIVSAEAWGRADCGFTSESYQQGVLSATILYEILLGKATLYAVLVSALVLMAMVKRKDSRGRAKRSGSGATNFSLLKQAGDVEENPGPTSATMDWIWRILFLVGAATGAHSGFLLIQAWPENRTDLHAGPSGSGGGGSGGGGSGGGGSFEQVQLQQPGAELVKPGASVKMSCKASGYAFSSYWINWMKQKPGQGLEWIGQIYPGDGDTNYNGKFKGRATLTADTSSSTAYMQLSSLTSEDSAVYFCARSITTVVGCAMDYWGQGTSVTVSSTRIQNPDPAVYQLRDSKSSDKSVCLFTDFDSQTNVSQSKDSDVYITDKCVLDMRSMDFKSNSAVAWSNKSDFACANAFNNSIIPEDTFFPSPESSCDVKLVEKSFETDTNLNFQNLSVIGFRILLLKVAGFNLLMTLRLWSSRAKRSGSGVKQTLNFDLLKLAGDVESNPGPSRGHMTEYKPTVRLATRDDVPRAVRTLAAAFADYPATRHTVDPDRHIERVTELQELFLTRVGLDIGKVWVADDGAAVAVWTTPESVEAGAVFAEIGPRMAELSGSRLAAQQQMEGLLAPHRPKEPAWFLATVGVSPDHQGKGLGSAVVLPGVEAAERAGVPAFLETSAPRNLPFYERLGFTVTADVEVPEGPRTWCMTRKPGA

SEQ ID NO: 23051 - protein, 923 aa, Artificial Sequence
  Synthetic Polypeptide
MALPVTALLLPLALLLHAARPDIQMTQSPSSLSASVGDRVTITCKASDHINNWLAWYQQKPGQAPKLLIYGATTLETGVPSRFSGSGSGTDYTLTISSLQPEDFATYYCQQSWNTPWTFGQGTKLEIKRLEDLKNVFPPEVAVFEPSEAEISHTQKATLVCLATGFYPDHVELSWWVNGKEVHSGVCTDPQPLKEQPALNDSRYCLSSRLRVSATFWQNPRNHFRCQVQFYGLSENDEWTQDRAKPVTQIVSAEAWGRADCGFTSESYQQGVLSATILYEILLGKATLYAVLVSALVLMAMVKRKDSRGRAKRSGSGATNFSLLKQAGDVEENPGPTSATMDWIWRILFLVGAATGAHSIYPPLLRTSQAMGSGGPGSGSCQFDLSTRRLKCGSGSCQFDLSTRRLKCGSGGGGSGGGGSGGGGSFEQVQLQQPGAELVKPGASVKMSCKASGYAFSSYWINWMKQKPGQGLEWIGQIYPGDGDTNYNGKFKGRATLTADTSSSTAYMQLSSLTSEDSAVYFCARSITTVVGCAMDYWGQGTSVTVSSTRIQNPDPAVYQLRDSKSSDKSVCLFTDFDSQTNVSQSKDSDVYITDKCVLDMRSMDFKSNSAVAWSNKSDFACANAFNNSIIPEDTFFPSPESSCDVKLVEKSFETDTNLNFQNLSVIGFRILLLKVAGFNLLMTLRLWSSRAKRSGSGVKQTLNFDLLKLAGDVESNPGPSRGHMTEYKPTVRLATRDDVPRAVRTLAAAFADYPATRHTVDPDRHIERVTELQELFLTRVGLDIGKVWVADDGAAVAVWTTPESVEAGAVFAEIGPRMAELSGSRLAAQQQMEGLLAPHRPKEPAWFLATVGVSPDHQGKGLGSAVVLPGVEAAERAGVPAFLETSAPRNLPFYERLGFTVTADVEVPEGPRTWCMTRKPGA

SEQ ID NO: 23052 - protein, 923 aa, Artificial Sequence
  Synthetic Polypeptide
MALPVTALLLPLALLLHAARPDIQMTQSPSSLSASVGDRVTITCKASDHINNWLAWYQQKPGQAPKLLIYGATTLETGVPSRFSGSGSGTDYTLTISSLQPEDFATYYCQQSWNTPWTFGQGTKLEIKRLEDLKNVFPPEVAVFEPSEAEISHTQKATLVCLATGFYPDHVELSWWVNGKEVHSGVCTDPQPLKEQPALNDSRYCLSSRLRVSATFWQNPRNHFRCQVQFYGLSENDEWTQDRAKPVTQIVSAEAWGRADCGFTSESYQQGVLSATILYEILLGKATLYAVLVSALVLMAMVKRKDSRGRAKRSGSGATNFSLLKQAGDVEENPGPTSATMDWIWRILFLVGAATGAHSGCPKWDAARCSGGGSGPGSGSCQFDLSTRRLKCGSGSCQFDLSTRRLKCGSGGGGSGGGGSGGGGSFEQVQLQQPGAELVKPGASVKMSCKASGYAFSSYWINWMKQKPGQGLEWIGQIYPGDGDTNYNGKFKGRATLTADTSSSTAYMQLSSLTSEDSAVYFCARSITTVVGCAMDYWGQGTSVTVSSTRIQNPDPAVYQLRDSKSSDKSVCLFTDFDSQTNVSQSKDSDVYITDKCVLDMRSMDFKSNSAVAWSNKSDFACANAFNNSIIPEDTFFPSPESSCDVKLVEKSFETDTNLNFQNLSVIGFRILLLKVAGFNLLMTLRLWSSRAKRSGSGVKQTLNFDLLKLAGDVESNPGPSRGHMTEYKPTVRLATRDDVPRAVRTLAAAFADYPATRHTVDPDRHIERVTELQELFLTRVGLDIGKVWVADDGAAVAVWTTPESVEAGAVFAEIGPRMAELSGSRLAAQQQMEGLLAPHRPKEPAWFLATVGVSPDHQGKGLGSAVVLPGVEAAERAGVPAFLETSAPRNLPFYERLGFTVTADVEVPEGPRTWCMTRKPGA

SEQ ID NO: 23053 - protein, 1047 aa, Artificial Sequence
  Synthetic Polypeptide
MALPVTALLLPLALLLHAARPDIQMTQSPSSLSASVGDRVTITCKASDHINNWLAWYQQKPGQAPKLLIYGATTLETGVPSRFSGSGSGTDYTLTISSLQPEDFATYYCQQSWNTPWTFGQGTKLEIKRLEDLKNVFPPEVAVFEPSEAEISHTQKATLVCLATGFYPDHVELSWWVNGKEVHSGVCTDPQPLKEQPALNDSRYCLSSRLRVSATFWQNPRNHFRCQVQFYGLSENDEWTQDRAKPVTQIVSAEAWGRADCGFTSESYQQGVLSATILYEILLGKATLYAVLVSALVLMAMVKRKDSRGRAKRSGSGATNFSLLKQAGDVEENPGPTSATMDWIWRILFLVGAATGAHSQLGPYELWELSHGSGSGSGSQLGPYELWELSHSGGGSGQLGPYELWELSHGSSGPEVQLVESGGGLVQAGGSLRLSCAASGRTFSMGWFRQAPGKEREFVAAITYSGGSPYYADSVKGRFTISRDNAKNTVYLQMNSLKPEDTAVYYCAANPTYGSDWNAENWGQGTQVTVSSGSGGGGSGGGGSGGGGSFEQVQLQQPGAELVKPGASVKMSCKASGYAFSSYWINWMKQKPGQGLEWIGQIYPGDGDTNYNGKFKGRATLTADTSSSTAYMQLSSLTSEDSAVYFCARSITTVVGCAMDYWGQGTSVTVSSTRIQNPDPAVYQLRDSKSSDKSVCLFTDFDSQTNVSQSKDSDVYITDKCVLDMRSMDFKSNSAVAWSNKSDFACANAFNNSIIPEDTFFPSPESSCDVKLVEKSFETDTNLNFQNLSVIGFRILLLKVAGFNLLMTLRLWSSRAKRSGSGVKQTLNFDLLKLAGDVESNPGPSRGHMTEYKPTVRLATRDDVPRAVRTLAAAFADYPATRHTVDPDRHIERVTELQELFLTRVGLDIGKVWVADDGAAVAVWTTPESVEAGAVFAEIGPRMAELSGSRLAAQQQMEGLLAPHRPKEPAWFLATVGVSPDHQGKGLGSAVVLPGVEAAERAGVPAFLETSAPRNLPFYERLGFTVTADVEVPEGPRTWCMTRKPGA

SEQ ID NO: 23054 - protein, 933 aa, Artificial Sequence
  Synthetic Polypeptide
MALPVTALLLPLALLLHAARPACPYINIYNAEPANPSEKNSPTQYAYGTGGGGSGGGGSGGGGSEFDIQMTQSPSSLSASVGDRVTITCKASDHINNWLAWYQQKPGQAPKLLIYGATTLETGVPSRFSGSGSGTDYTLTISSLQPEDFATYYCQQSWNTPWTFGQGTKLEIKRLEDLKNVFPPEVAVFEPSEAEISHTQKATLVCLATGFYPDHVELSWWVNGKEVHSGVCTDPQPLKEQPALNDSRYCLSSRLRVSATFWQNPRNHFRCQVQFYGLSENDEWTQDRAKPVTQIVSAEAWGRADCGFTSESYQQGVLSATILYEILLGKATLYAVLVSALVLMAMVKRKDSRGRAKRSGSGATNFSLLKQAGDVEENPGPTSATMDWIWRILFLVGAATGAHSGPQLGPYELWELSHGSGGGGSGGGGSGGGGSFEQVQLQQPGAELVKPGASVKMSCKASGYAFSSYWINWMKQKPGQGLEWIGQIYPGDGDTNYNGKFKGRATLTADTSSSTAYMQLSSLTSEDSAVYFCARSITTVVGCAMDYWGQGTSVTVSSTRIQNPDPAVYQLRDSKSSDKSVCLFTDFDSQTNVSQSKDSDVYITDKCVLDMRSMDFKSNSAVAWSNKSDFACANAFNNSIIPEDTFFPSPESSCDVKLVEKSFETDTNLNFQNLSVIGFRILLLKVAGFNLLMTLRLWSSRAKRSGSGVKQTLNFDLLKLAGDVESNPGPSRGHMTEYKPTVRLATRDDVPRAVRTLAAAFADYPATRHTVDPDRHIERVTELQELFLTRVGLDIGKVWVADDGAAVAVWTTPESVEAGAVFAEIGPRMAELSGSRLAAQQQMEGLLAPHRPKEPAWFLATVGVSPDHQGKGLGSAVVLPGVEAAERAGVPAFLETSAPRNLPFYERLGFTVTADVEVPEGPRTWCMTRKPGA

SEQ ID NO: 23055 - protein, 919 aa, Artificial Sequence
  Synthetic Polypeptide
MALPVTALLLPLALLLHAARPDIQMTQSPSSLSASVGDRVTITCKASDHINNWLAWYQQKPGQAPKLLIYGATTLETGVPSRFSGSGSGTDYTLTISSLQPEDFATYYCQQSWNTPWTFGQGTKLEIKRLEDLKNVFPPEVAVFEPSEAEISHTQKATLVCLATGFYPDHVELSWWVNGKEVHSGVCTDPQPLKEQPALNDSRYCLSSRLRVSATFWQNPRNHFRCQVQFYGLSENDEWTQDRAKPVTQIVSAEAWGRADCGFTSESYQQGVLSATILYEILLGKATLYAVLVSALVLMAMVKRKDSRGRAKRSGSGATNFSLLKQAGDVEENPGPTSATMDWIWRILFLVGAATGAHSGPYINIYNAEPANPSEKNSPSTQYAYGGGSQLGPYELWELSHGSGGSGGGGSGGGGSGGGGSFEQVQLQQPGAELVKPGASVKMSCKASGYAFSSYWINWMKQKPGQGLEWIGQIYPGDGDTNYNGKFKGRATLTADTSSSTAYMQLSSLTSEDSAVYFCARSITTVVGCAMDYWGQGTSVTVSSTRIQNPDPAVYQLRDSKSSDKSVCLFTDFDSQTNVSQSKDSDVYITDKCVLDMRSMDFKSNSAVAWSNKSDFACANAFNNSIIPEDTFFPSPESSCDVKLVEKSFETDTNLNFQNLSVIGFRILLLKVAGFNLLMTLRLWSSRAKRSGSGVKQTLNFDLLKLAGDVESNPGPSRGHMTEYKPTVRLATRDDVPRAVRTLAAAFADYPATRHTVDPDRHIERVTELQELFLTRVGLDIGKVWVADDGAAVAVWTTPESVEAGAVFAEIGPRMAELSGSRLAAQQQMEGLLAPHRPKEPAWFLATVGVSPDHQGKGLGSAVVLPGVEAAERAGVPAFLETSAPRNLPFYERLGFTVTADVEVPEGPRTWCMTRKPGA

SEQ ID NO: 23056 - protein, 1019 aa, Artificial Sequence
  Synthetic Polypeptide
MALPVTALLLPLALLLHAARPDIQMTQSPSSLSASVGDRVTITCKASDHINNWLAWYQQKPGQAPKLLIYGATTLETGVPSRFSGSGSGTDYTLTISSLQPEDFATYYCQQSWNTPWTFGQGTKLEIKRLEDLKNVFPPEVAVFEPSEAEISHTQKATLVCLATGFYPDHVELSWWVNGKEVHSGVCTDPQPLKEQPALNDSRYCLSSRLRVSATFWQNPRNHFRCQVQFYGLSENDEWTQDRAKPVTQIVSAEAWGRADCGFTSESYQQGVLSATILYEILLGKATLYAVLVSALVLMAMVKRKDSRGRAKRSGSGATNFSLLKQAGDVEENPGPTSATMDWIWRILFLVGAATGAHSYINIYNAEPANPSEKNSPSTQYAYGSGSSYINIYNAEPANPSEKNSPSTQYAYGSGGSYINIYNAEPANPSEKNSPSTQYAYGSGSSSYINIYNAEPANPSEKNSPSTQYAYGSGSGSYINIYNAEPANPSEKNSPSTQYAYGPSGSGGGGSGGGGSGGGGSFEQVQLQQPGAELVKPGASVKMSCKASGYAFSSYWINWMKQKPGQGLEWIGQIYPGDGDTNYNGKFKGRATLTADTSSSTAYMQLSSLTSEDSAVYFCARSITTVVGCAMDYWGQGTSVTVSSTRIQNPDPAVYQLRDSKSSDKSVCLFTDFDSQTNVSQSKDSDVYITDKCVLDMRSMDFKSNSAVAWSNKSDFACANAFNNSIIPEDTFFPSPESSCDVKLVEKSFETDTNLNFQNLSVIGFRILLLKVAGFNLLMTLRLWSSRAKRSGSGVKQTLNFDLLKLAGDVESNPGPSRGHMTEYKPTVRLATRDDVPRAVRTLAAAFADYPATRHTVDPDRHIERVTELQELFLTRVGLDIGKVWVADDGAAVAVWTTPESVEAGAVFAEIGPRMAELSGSRLAAQQQMEGLLAPHRPKEPAWFLATVGVSPDHQGKGLGSAVVLPGVEAAERAGVPAFLETSAPRNLPFYERLGFTVTADVEVPEGPRTWCMTRKPGA

SEQ ID NO: 23057 - protein, 909 aa, Artificial Sequence
  Synthetic Polypeptide
MALPVTALLLPLALLLHAARPDIQMTQSPSSLSASVGDRVTITCKASDHINNWLAWYQQKPGQAPKLLIYGATTLETGVPSRFSGSGSGTDYTLTISSLQPEDFATYYCQQSWNTPWTFGQGTKLEIKRLEDLKNVFPPEVAVFEPSEAEISHTQKATLVCLATGFYPDHVELSWWVNGKEVHSGVCTDPQPLKEQPALNDSRYCLSSRLRVSATFWQNPRNHFRCQVQFYGLSENDEWTQDRAKPVTQIVSAEAWGRADCGFTSESYQQGVLSATILYEILLGKATLYAVLVSALVLMAMVKRKDSRGRAKRSGSGATNFSLLKQAGDVEENPGPTSATMDWIWRILFLVGAATGAHSCQYNLSSRALKCGGGSCQYNLSSRALKCGGGSGPSGSGGGGSGGGGSGGGGSFEQVQLQQPGAELVKPGASVKMSCKASGYAFSSYWINWMKQKPGQGLEWIGQIYPGDGDTNYNGKFKGRATLTADTSSSTAYMQLSSLTSEDSAVYFCARSITTVVGCAMDYWGQGTSVTVSSTRIQNPDPAVYQLRDSKSSDKSVCLFTDFDSQTNVSQSKDSDVYITDKCVLDMRSMDFKSNSAVAWSNKSDFACANAFNNSIIPEDTFFPSPESSCDVKLVEKSFETDTNLNFQNLSVIGFRILLLKVAGFNLLMTLRLWSSRAKRSGSGVKQTLNFDLLKLAGDVESNPGPSRGHMTEYKPTVRLATRDDVPRAVRTLAAAFADYPATRHTVDPDRHIERVTELQELFLTRVGLDIGKVWVADDGAAVAVWTTPESVEAGAVFAEIGPRMAELSGSRLAAQQQMEGLLAPHRPKEPAWFLATVGVSPDHQGKGLGSAVVLPGVEAAERAGVPAFLETSAPRNLPFYERLGFTVTADVEVPEGPRTWCMTRKPGA

SEQ ID NO: 23058 - protein, 1027 aa, Artificial Sequence; identical to SEQ ID NO: 23033
  Synthetic Polypeptide

SEQ ID NO: 23059 - protein, 888 aa, Artificial Sequence; identical to SEQ ID NO: 23034
  Synthetic Polypeptide

SEQ ID NO: 23060 - protein, 1128 aa, Artificial Sequence; identical to SEQ ID NO: 23035
  Synthetic Polypeptide

SEQ ID NO: 23061 - protein, 1132 aa, Artificial Sequence; identical to SEQ ID NO: 23036
  Synthetic Polypeptide

SEQ ID NO: 23062 - protein, 1020 aa, Artificial Sequence; identical to SEQ ID NO: 23037
  Synthetic Polypeptide

SEQ ID NO: 23063 - protein, 881 aa, Artificial Sequence; identical to SEQ ID NO: 23038
  Synthetic Polypeptide

SEQ ID NO: 23064 - protein, 989 aa, Artificial Sequence; identical to SEQ ID NO: 23039
  Synthetic Polypeptide

SEQ ID NO: 23065 - protein, 987 aa, Artificial Sequence; identical to SEQ ID NO: 23040
  Synthetic Polypeptide

SEQ ID NO: 23066 - protein, 9 aa, Artificial Sequence
  Synthetic Polypeptide
GGGGGGGGG

SEQ ID NO: 23067 - protein, 1048 aa, Artificial Sequence
  Synthetic Polypeptide
MALPVTALLLPLALLLHAARPDIQMTQSPSSLSASVGDRVTITCKASDHINNWLAWYQQKPGQAPKLLIYGATTLETGVPSRFSGSGSGTDYTLTISSLQPEDFATYYCQQSWNTPWTFGQGTKLEIKRLEDLKNVFPPEVAVFEPSEAEISHTQKATLVCLATGFYPDHVELSWWVNGKEVHSGVCTDPQPLKEQPALNDSRYCLSSRLRVSATFWQNPRNHFRCQVQFYGLSENDEWTQDRAKPVTQIVSAEAWGRADCGFTSESYQQGVLSATILYEILLGKATLYAVLVSALVLMAMVKRKDSRGRAKRSGSGATNFSLLKQAGDVEENPGPTSATMDWIWRILFLVGAATGAHSGPGLLDLRQGMFAQLVAQNVLLIDGPLSWYSDPGLAGVSLTGGLSYKEDTKELVVAKAGVYYVFFQLELRRVVAGEGSGSVSLALHLQPLRSAAGAAALALTVDLPPASSEARNSAFGFQGRLLHLSAGQRLGVHLHTEARARHAWQLTQGATVLGLFRVTPEIPAGLPSPRSEGSGGGGSGGGGSGGGGSFEQVQLQQPGAELVKPGASVKMSCKASGYAFSSYWINWMKQKPGQGLEWIGQIYPGDGDTNYNGKFKGRATLTADTSSSTAYMQLSSLTSEDSAVYFCARSITTVVGCAMDYWGQGTSVTVSSTRIQNPDPAVYQLRDSKSSDKSVCLFTDFDSQTNVSQSKDSDVYITDKCVLDMRSMDFKSNSAVAWSNKSDFACANAFNNSIIPEDTFFPSPESSCDVKLVEKSFETDTNLNFQNLSVIGFRILLLKVAGFNLLMTLRLWSSRAKRSGSGVKQTLNFDLLKLAGDVESNPGPSRGHMTEYKPTVRLATRDDVPRAVRTLAAAFADYPATRHTVDPDRHIERVTELQELFLTRVGLDIGKVWVADDGAAVAVWTTPESVEAGAVFAEIGPRMAELSGSRLAAQQQMEGLLAPHRPKEPAWFLATVGVSPDHQGKGLGSAVVLPGVEAAERAGVPAFLETSAPRNLPFYERLGFTVTADVEVPEGPRTWCMTRKPGA

SEQ ID NO: 23068 - protein, 1010 aa, Artificial Sequence
  Synthetic Polypeptide
MALPVTALLLPLALLLHAARPDIQMTQSPSSLSASVGDRVTITCKASDHINNWLAWYQQKPGQAPKLLIYGATTLETGVPSRFSGSGSGTDYTLTISSLQPEDFATYYCQQSWNTPWTFGQGTKLEIKRLEDLKNVFPPEVAVFEPSEAEISHTQKATLVCLATGFYPDHVELSWWVNGKEVHSGVCTDPQPLKEQPALNDSRYCLSSRLRVSATFWQNPRNHFRCQVQFYGLSENDEWTQDRAKPVTQIVSAEAWGRADCGFTSESYQQGVLSATILYEILLGKATLYAVLVSALVLMAMVKRKDSRGRAKRSGSGATNFSLLKQAGDVEENPGPTSATMDWIWRILFLVGAATGAHSGPVLHLVPINATSKDDSDVTEVMWQPALRRGRGLQAQGYGVRIQDAGVYLLYSQVLFQDVTFTMGQVVSREGQGRQETLFRCIRSMPSHPDRAYNSCYSAGVFHLHQGDILSVIIPRARAKLNLSPHGTFLGFVKLGSGGGGSGGGGSGGGGSFEQVQLQQPGAELVKPGASVKMSCKASGYAFSSYWINWMKQKPGQGLEWIGQIYPGDGDTNYNGKFKGRATLTADTSSSTAYMQLSSLTSEDSAVYFCARSITTVVGCAMDYWGQGTSVTVSSTRIQNPDPAVYQLRDSKSSDKSVCLFTDFDSQTNVSQSKDSDVYITDKCVLDMRSMDFKSNSAVAWSNKSDFACANAFNNSIIPEDTFFPSPESSCDVKLVEKSFETDTNLNFQNLSVIGFRILLLKVAGFNLLMTLRLWSSRAKRSGSGVKQTLNFDLLKLAGDVESNPGPSRGHMTEYKPTVRLATRDDVPRAVRTLAAAFADYPATRHTVDPDRHIERVTELQELFLTRVGLDIGKVWVADDGAAVAVWTTPESVEAGAVFAEIGPRMAELSGSRLAAQQQMEGLLAPHRPKEPAWFLATVGVSPDHQGKGLGSAVVLPGVEAAERAGVPAFLETSAPRNLPFYERLGFTVTADVEVPEGPRTWCMTRKPGA

SEQ ID NO: 23069 - protein, 1149 aa, Artificial Sequence
  Synthetic Polypeptide
MALPVTALLLPLALLLHAARPACVLHLVPINATSKDDSDVTEVMWQPALRRGRGLQAQGYGVRIQDAGVYLLYSQVLFQDVTFTMGQVVSREGQGRQETLFRCIRSMPSHPDRAYNSCYSAGVFHLHQGDILSVIIPRARAKLNLSPHGTFLGFVKLGTGGGGSGGGGSGGGGSEFDIQMTQSPSSLSASVGDRVTITCKASDHINNWLAWYQQKPGQAPKLLIYGATTLETGVPSRFSGSGSGTDYTLTISSLQPEDFATYYCQQSWNTPWTFGQGTKLEIKRLEDLKNVFPPEVAVFEPSEAEISHTQKATLVCLATGFYPDHVELSWWVNGKEVHSGVCTDPQPLKEQPALNDSRYCLSSRLRVSATFWQNPRNHFRCQVQFYGLSENDEWTQDRAKPVTQIVSAEAWGRADCGFTSESYQQGVLSATILYEILLGKATLYAVLVSALVLMAMVKRKDSRGRAKRSGSGATNFSLLKQAGDVEENPGPTSATMDWIWRILFLVGAATGAHSGPEVQLVESGGGLVQAGGSLRLSCAASGRTFSMGWFRQAPGKEREFVAAITYSGGSPYYADSVKGRFTISRDNAKNTVYLQMNSLKPEDTAVYYCAANPTYGSDWNAENWGQGTQVTVSSGSGGGGSGGGGSGGGGSFEQVQLQQPGAELVKPGASVKMSCKASGYAFSSYWINWMKQKPGQGLEWIGQIYPGDGDTNYNGKFKGRATLTADTSSSTAYMQLSSLTSEDSAVYFCARSITTVVGCAMDYWGQGTSVTVSSTRIQNPDPAVYQLRDSKSSDKSVCLFTDFDSQTNVSQSKDSDVYITDKCVLDMRSMDFKSNSAVAWSNKSDFACANAFNNSIIPEDTFFPSPESSCDVKLVEKSFETDTNLNFQNLSVIGFRILLLKVAGFNLLMTLRLWSSRAKRSGSGVKQTLNFDLLKLAGDVESNPGPSRGHMTEYKPTVRLATRDDVPRAVRTLAAAFADYPATRHTVDPDRHIERVTELQELFLTRVGLDIGKVWVADDGAAVAVWTTPESVEAGAVFAEIGPRMAELSGSRLAAQQQMEGLLAPHRPKEPAWFLATVGVSPDHQGKGLGSAVVLPGVEAAERAGVPAFLETSAPRNLPFYERLGFTVTADVEVPEGPRTWCMTRKPGA

SEQ ID NO: 23070 - protein, 9 aa, Artificial Sequence
  Synthetic Polypeptide
GGGGGGGGG

SEQ ID NO: 23071 - protein, 1125 aa, Artificial Sequence
  Synthetic Polypeptide
MGPRLLFWALLCLLGTGPVEAGVTQSPTHLIKTRGQQATLRCSPISGHTSVYWYQQALGLGLQFLLWYDEGEERNRGNFPPRFSGRQFPNYSSELNVNALELEDSALYLCASSLGGPRGLAGLRGDEQFFGPGTRLTVLEGTGGGGSGGGEFDIQMTQSPSSLSASVGDRVTITCKASDHINNWLAWYQQKPGQAPKLLIYGATTLETGVPSRFSGSGSGTDYTLTISSLQPEDFATYYCQQSWNTPWTFGQGTKLEIKRLEDLKNVFPPEVAVFEPSEAEISHTQKATLVCLATGFYPDHVELSWWVNGKEVHSGVCTDPQPLKEQPALNDSRYCLSSRLRVSATFWQNPRNHFRCQVQFYGLSENDEWTQDRAKPVTQIVSAEAWGRADCGFTSESYQQGVLSATILYEILLGKATLYAVLVSALVLMAMVKRKDSRGRAKRSGSGATNFSLLKQAGDVEENPGPTSATMDWIWRILFLVGAATGAHSGPEVQLVESGGGLVQAGGSLRLSCAASGRTFSMGWFRQAPGKEREFVAAITYSGGSPYYADSVKGRFTISRDNAKNTVYLQMNSLKPEDTAVYYCAANPTYGSDWNAENWGQGTQVTVSSGSGGGGSGGGGSGGGGSFEQVQLQQPGAELVKPGASVKMSCKASGYAFSSYWINWMKQKPGQGLEWIGQIYPGDGDTNYNGKFKGRATLTADTSSSTAYMQLSSLTSEDSAVYFCARSITTVVGCAMDYWGQGTSVTVSSTRIQNPDPAVYQLRDSKSSDKSVCLFTDFDSQTNVSQSKDSDVYITDKCVLDMRSMDFKSNSAVAWSNKSDFACANAFNNSIIPEDTFFPSPESSCDVKLVEKSFETDTNLNFQNLSVIGFRILLLKVAGFNLLMTLRLWSSRAKRSGSGVKQTLNFDLLKLAGDVESNPGPSRGHMTEYKPTVRLATRDDVPRAVRTLAAAFADYPATRHTVDPDRHIERVTELQELFLTRVGLDIGKVWVADDGAAVAVWTTPESVEAGAVFAEIGPRMAELSGSRLAAQQQMEGLLAPHRPKEPAWFLATVGVSPDHQGKGLGSAVVLPGVEAAERAGVPAFLETSAPRNLPFYERLGFTVTADVEVPEGPRTWCMTRKPGA

SEQ ID NO: 23072 - protein, 1129 aa, Artificial Sequence
  Synthetic Polypeptide
MGPRLLFWALLCLLGTGPVEAGVTQSPTHLIKTRGQQATLRCSPISGHTSVYWYQQALGLGLQFLLWYDEGEERNRGNFPPRFSGRQFPNYSSELNVNALELEDSALYLCASSLGGPRGLAGLRGDEQFFGPGTRLTVLEGTGGGGSGGGEFDIQMTQSPSSLSASVGDRVTITCKASDHINNWLAWYQQKPGQAPKLLIYGATTLETGVPSRFSGSGSGTDYTLTISSLQPEDFATYYCQQSWNTPWTFGQGTKLEIKRLEGQPKANPTVTLFPPSSEELQANKATLVCLISDFYPGAVTVAWKADGSPVKAGVETTKPSKQSNNKYAASSYLSLTPEQWKSHRSYSCQVTHEGSTVEKTVAPTECSGRADCGFTSESYQQGVLSATILYEILLGKATLYAVLVSALVLMAMVKRKDSRGRAKRSGSGATNFSLLKQAGDVEENPGPTSATMDWIWRILFLVGAATGAHSGPQVQLQESGGGLAQAGGSLRLSCAASGRTFSMGWFRQAPGKEREFVAAITYSGGSPYYASSVRGRFTISRDNAKNTVYLQMNSLKPEDTAVYYCAANPTYGSDWNAENWGQGTQVTVSSGSGGGGSGGGGSGGGGSFEQVQLQQPGAELVKPGASVKMSCKASGYAFSSYWINWMKQKPGQGLEWIGQIYPGDGDTNYNGKFKGRATLTADTSSSTAYMQLSSLTSEDSAVYFCARSITTVVGCAMDYWGQGTSVTVSSTRASTKGPSVFPLAPSSKSTSGGTAALGCLVKDYFPEPVTVSWNSGALTSGVHTFPAVLQSSGLYSLSSVVTVPSSSLGTQTYICNVNHKPSNTKVDKRVEPKSCIPEDTFFPSPESSCDVKLVEKSFETDTNLNFQNLSVIGFRILLLKVAGFNLLMTLRLWSSRAKRSGSGVKQTLNFDLLKLAGDVESNPGPSRGHMTEYKPTVRLATRDDVPRAVRTLAAAFADYPATRHTVDPDRHIERVTELQELFLTRVGLDIGKVWVADDGAAVAVWTTPESVEAGAVFAEIGPRMAELSGSRLAAQQQMEGLLAPHRPKEPAWFLATVGVSPDHQGKGLGSAVVLPGVEAAERAGVPAFLETSAPRNLPFYERLGFTVTADVEVPEGPRTWCMTRKPGA

SEQ ID NO: 23073 - protein, 1124 aa, Artificial Sequence
  Synthetic Polypeptide
MGPRLLFWALLCLLGTGPVEAGVTQSPTHLIKTRGQQATLRCSPISGHTSVYWYQQALGLGLQFLLWYDEGEERNRGNFPPRFSGRQFPNYSSELNVNALELEDSALYLCASSLGGDELGADGNEQFFGPGTRLTVLEGTGGGGSGGGSEFDIQMTQSPSSLSASVGDRVTITCKASDHINNWLAWYQQKPGQAPKLLIYGATTLETGVPSRFSGSGSGTDYTLTISSLQPEDFATYYCQQSWNTPWTFGQGTKLEIKRLEDLKNVFPPEVAVFEPSKAEIAHTQKATLVCLATGFYPDHVELSWWVNGKEVHSGVCTDPQPLKEQPALNDSRYCLSSRLRVSATFWQNPRNHFRCQVQFYGLSENDEWTQDRAKPVTQIVSAEAWGRADCGITSASYHQGVLSATILYEILLGKATLYAVLVSALVLMAMVKRKDSRGRAKRSGSGATNFSLLKQAGDVEENPGPTSATMDWIWRILFLVGAATGAHSGPQVQLQESGGGLAQAGGSLRLSCAASGRTFSMGWFRQAPGKEREFVAAITYSGGSPYYASSVRGRFTISRDNAKNTVYLQMNSLKPEDTAVYYCAANPTYGSDWNAENWGQGTQVTVSSGSGGGGSGGGGSGGGGSFEQVQLQQPGAELVKPGASVKMSCKASGYAFSSYWINWMKQKPGQGLEWIGQIYPGDGDTNYNGKFKGRATLTADTSSSTAYMQLSSLTSEDSAVYFCARSITTVVGCAMDYWGQGTSVTVSSTRIQNPDPAVYQLRDSKSSDKSVCLFTDFDSQTNVSQSKDSDVYITDKCVLDMRSMDFKSNSAVAWSNKSDFACANAFNNSIIPEDTFFPSSDVPCDVKLVEKSFETDTNLNFQNLSVIGFRILLLKVAGFNLLMTLRLWSSRAKRSGSGVKQTLNFDLLKLAGDVESNPGPSRGHMTEYKPTVRLATRDDVPRAVRTLAAAFADYPATRHTVDPDRHIERVTELQELFLTRVGLDIGKVWVADDGAAVAVWTTPESVEAGAVFAEIGPRMAELSGSRLAAQQQMEGLLAPHRPKEPAWFLATVGVSPDHQGKGLGSAVVLPGVEAAERAGVPAFLETSAPRNLPFYERLGFTVTADVEVPEGPRTWCMTRKPGA

SEQ ID NO: 23074 - protein, 1124 aa, Artificial Sequence
  Synthetic Polypeptide
MGPRLLFWALLCLLGTGPVEAGVTQSPTHLIKTRGQQATLRCSPISGHTSVYWYQQALGLGLQFLLWYDEGEERNRGNFPPRFSGRQFPNYSSELNVNALELEDSALYLCASSLGGDELGADGNEQFFGPGTRLTVLEGTGGGGSGGGSEFDIQMTQSPSSLSASVGDRVTITCKASDHINNWLAWYQQKPGQAPKLLIYGATTLETGVPSRFSGSGSGTDYTLTISSLQPEDFATYYCQQSWNTPWTFGQGTKLEIKRLEDLKNVFPPEVAVFEPSEAEISHTQKATLVCLATGFYPDHVELSWWVNGKEVHSGVCTDPQPLKEQPALNDSRYCLSSRLRVSATFWQNPRNHFRCQVQFYGLSENDEWTQDRAKPVTQIVSAEAWGRADCGFTSESYQQGVLSATILYEILLGKATLYAVLVSALVLMAMVKRKDSRGRAKRSGSGATNFSLLKQAGDVEENPGPTSATMDWIWRILFLVGAATGAHSGPEVQLVESGGGLVQAGGSLRLSCAASGRTFSMGWFRQAPGKEREFVAAITYSGGSPYYADSVKGRFTISRDNAKNTVYLQMNSLKPEDTAVYYCAANPTYGSDWNAENWGQGTQVTVSSGSGGGGSGGGGSGGGGSFEQVQLQQPGAELVKPGASVKMSCKASGYAFSSYWINWMKQKPGQGLEWIGQIYPGDGDTNYNGKFKGRATLTADTSSSTAYMQLSSLTSEDSAVYFCARSITTVVGCAMDYWGQGTSVTVSSTRIQNPDPAVYQLRDSKSSDKSVCLFTDFDSQTNVSQSKDSDVYITDKCVLDMRSMDFKSNSAVAWSNKSDFACANAFNNSIIPEDTFFPSPESSCDVKLVEKSFETDTNLNFQNLSVIGFRILLLKVAGFNLLMTLRLWSSRAKRSGSGVKQTLNFDLLKLAGDVESNPGPSRGHMTEYKPTVRLATRDDVPRAVRTLAAAFADYPATRHTVDPDRHIERVTELQELFLTRVGLDIGKVWVADDGAAVAVWTTPESVEAGAVFAEIGPRMAELSGSRLAAQQQMEGLLAPHRPKEPAWFLATVGVSPDHQGKGLGSAVVLPGVEAAERAGVPAFLETSAPRNLPFYERLGFTVTADVEVPEGPRTWCMTRKPGA

SEQ ID NO: 23075 - protein, 1150 aa, Artificial Sequence
  Synthetic Polypeptide
MGPRLLFWALLCLLGTGPVEAGVTQSPTHLIKTRGQQATLRCSPISGHTSVYWYQQALGLGLQFLLWYDEGEERNRGNFPPRFSGRQFPNYSSELNVNALELEDSALYLCASSLGGDELGADGNEQFFGPGTRLTVLEGTGGGGSGGGSEFDIQMTQSPSSLSASVGDRVTITCKASDHINNWLAWYQQKPGQAPKLLIYGATTLETGVPSRFSGSGSGTDYTLTISSLQPEDFATYYCQQSWNTPWTFGQGTKLEIKRLEGQPKANPTVTLFPPSSEELQANKATLVCLISDFYPGAVTVAWKADGSPVKAGVETTKPSKQSNNKYAASSYLSLTPEQWKSHRSYSCQVTHEGSTVEKTVAPTECSPIKTDVITMDPKDNCSKDANDTLLLQLTNTSAYYMYLLLLLKSVVYFAIITCCLLRRTAFCCNGEKSRAKRSGSGATNFSLLKQAGDVEENPGPTSATMDWIWRILFLVGAATGAHSGPQVQLQESGGGLAQAGGSLRLSCAASGRTFSMGWFRQAPGKEREFVAAITYSGGSPYYASSVRGRFTISRDNAKNTVYLQMNSLKPEDTAVYYCAANPTYGSDWNAENWGQGTQVTVSSGSGGGGSGGGGSGGGGSFEQVQLQQPGAELVKPGASVKMSCKASGYAFSSYWINWMKQKPGQGLEWIGQIYPGDGDTNYNGKFKGRATLTADTSSSTAYMQLSSLTSEDSAVYFCARSITTVVGCAMDYWGQGTSVTVSSTRASTKGPSVFPLAPSSKSTSGGTAALGCLVKDYFPEPVTVSWNSGALTSGVHTFPAVLQSSGLYSLSSVVTVPSSSLGTQTYICNVNHKPSNTKVDKRVEPKSCEVKTDSTDHVKPKETENTKQPSKSCHKPKAIVHTEKVNMMSLTVLGLRMLFAKTVAVNFLLTAKLFFLRAKRSGSGVKQTLNFDLLKLAGDVESNPGPSRGHMTEYKPTVRLATRDDVPRAVRTLAAAFADYPATRHTVDPDRHIERVTELQELFLTRVGLDIGKVWVADDGAAVAVWTTPESVEAGAVFAEIGPRMAELSGSRLAAQQQMEGLLAPHRPKEPAWFLATVGVSPDHQGKGLGSAVVLPGVEAAERAGVPAFLETSAPRNLPFYERLGFTVTADVEVPEGPRTWCMTRKPGA

SEQ ID NO: 23076 - protein, 1128 aa, Artificial Sequence
  Synthetic Polypeptide
MGPRLLFWALLCLLGTGPVEAGVTQSPTHLIKTRGQQATLRCSPISGHTSVYWYQQALGLGLQFLLWYDEGEERNRGNFPPRFSGRQFPNYSSELNVNALELEDSALYLCASSLGGDELGADGNEQFFGPGTRLTVLEGTGGGGSGGGSEFDIQMTQSPSSLSASVGDRVTITCKASDHINNWLAWYQQKPGQAPKLLIYGATTLETGVPSRFSGSGSGTDYTLTISSLQPEDFATYYCQQSWNTPWTFGQGTKLEIKRLEGQPKANPTVTLFPPSSEELQANKATLVCLISDFYPGAVTVAWKADGSPVKAGVETTKPSKQSNNKYAASSYLSLTPEQWKSHRSYSCQVTHEGSTVEKTVAPTECSGRADCGFTSESYQQGVLSATILYEILLGKATLYAVLVSALVLMAMVKRKDSRGRAKRSGSGATNFSLLKQAGDVEENPGPTSATMDWIWRILFLVGAATGAHSGPQVQLQESGGGLAQAGGSLRLSCAASGRTFSMGWFRQAPGKEREFVAAITYSGGSPYYASSVRGRFTISRDNAKNTVYLQMNSLKPEDTAVYYCAANPTYGSDWNAENWGQGTQVTVSSGSGGGGSGGGGSGGGGSFEQVQLQQPGAELVKPGASVKMSCKASGYAFSSYWINWMKQKPGQGLEWIGQIYPGDGDTNYNGKFKGRATLTADTSSSTAYMQLSSLTSEDSAVYFCARSITTVVGCAMDYWGQGTSVTVSSTRASTKGPSVFPLAPSSKSTSGGTAALGCLVKDYFPEPVTVSWNSGALTSGVHTFPAVLQSSGLYSLSSVVTVPSSSLGTQTYICNVNHKPSNTKVDKRVEPKSCIPEDTFFPSPESSCDVKLVEKSFETDTNLNFQNLSVIGFRILLLKVAGFNLLMTLRLWSSRAKRSGSGVKQTLNFDLLKLAGDVESNPGPSRGHMTEYKPTVRLATRDDVPRAVRTLAAAFADYPATRHTVDPDRHIERVTELQELFLTRVGLDIGKVWVADDGAAVAVWTTPESVEAGAVFAEIGPRMAELSGSRLAAQQQMEGLLAPHRPKEPAWFLATVGVSPDHQGKGLGSAVVLPGVEAAERAGVPAFLETSAPRNLPFYERLGFTVTADVEVPEGPRTWCMTRKPGA

SEQ ID NO: 23077 - protein, 1123 aa, Artificial Sequence
  Synthetic Polypeptide
MGPRLLFWALLCLLGTGPVEAGVTQSPTHLIKTRGQQATLRCSPISGHTSVYWYQQALGLGLQFLLWYDEGEERNRGNFPPRFSGRQFPNYSSELNVNALELEDSALYLCASSLGGDELGADGNEQFFGPGTRLTVLEGTGGGGSGGGSEFDIQMTQSPSSLSASVGDRVTITCKASDHINNWLAWYQQKPGQAPKLLIYGATTLETGVPSRFSGSGSGTDYTLTISSLQPEDFATYYCQQSWNTPWTFGQGTKLEIKRLEADVSPKPTIFLPSIAETKLQKAGTYLCLLEKFFPDVIKIHWQEKKSNTILGSQEGNTMKTNDTYMKFSWLTVPEKSLDKEHRCIVRHENNKNGVDQEIIFPPIKTDVITMDPKDNCSKDANDTLLLQLTNTSAYYMYLLLLLKSVVYFAIITCCLLRRTAFCCNGEKSRAKRSGSGATNFSLLKQAGDVEENPGPTSMDWIWRILFLVGAATGAHSGPQVQLQESGGGLAQAGGSLRLSCAASGRTFSMGWFRQAPGKEREFVAAITYSGGSPYYASSVRGRFTISRDNAKNTVYLQMNSLKPEDTAVYYCAANPTYGSDWNAENWGQGTQVTVSSGSGGGGSGGGGSGGGGSFEQVQLQQPGAELVKPGASVKMSCKASGYAFSSYWINWMKQKPGQGLEWIGQIYPGDGDTNYNGKFKGRATLTADTSSSTAYMQLSSLTSEDSAVYFCARSITTVVGCAMDYWGQGTSVTVSSTRPHTKPSVFVMKNGTNVACLVKEFYPKDIRINLVSSKKITEFDPAIVISPSGKYNAVKLGKYEDSNSVTCSVQHDNKTVHSTDFEVKTDSTDHVKPKETENTKQPSKSCHKPKAIVHTEKVNMMSLTVLGLRMLFAKTVAVNFLLTAKLFFLRAKRSGSGVKQTLNFDLLKLAGDVESNPGPSRGHMTEYKPTVRLATRDDVPRAVRTLAAAFADYPATRHTVDPDRHIERVTELQELFLTRVGLDIGKVWVADDGAAVAVWTTPESVEAGAVFAEIGPRMAELSGSRLAAQQQMEGLLAPHRPKEPAWFLATVGVSPDHQGKGLGSAVVLPGVEAAERAGVPAFLETSAPRNLPFYERLGFTVTADVEVPEGPRTWCMTRKPGA

SEQ ID NO: 23078 - protein, 9 aa, Artificial Sequence
  Synthetic Polypeptide
GGGGGGGGG

SEQ ID NO: 23079-23083 - skipped (5 entries)

SEQ ID NO: 23084 - protein, 768 aa, Artificial Sequence
  Synthetic Polypeptide
MALPVTALLLPLALLLHAARPACQVKLEESGGGLVQPGESLRLSCSASGSIFKVFRVFAMSWYRQGPGKQRELVASISSGETTTYAESVKGRFTISRDNAKNTAYLQMDSLKPEDTAVYYCNADHTFTGDFWGQGTQVTVSSGTGGGGSGGGGSGGGGSEFDIQMTQSPSSLSASVGDRVTITCKASDHINNWLAWYQQKPGQAPKLLIYGATTLETGVPSRFSGSGSGTDYTLTISSLQPEDFATYYCQQSWNTPWTFGQGTKLEIKRLEIQNPDPAVYQLRDSKSSDKSVCLFTDFDSQTNVSQSKDSDVYIIDKCVLDMRSMDFKSNSAVAWSNKSDFACANAFNNSIIPEDTFFPSPESSCDVKLVEKSFETDTNLNFQNLSVIGFRILLLKVAGFNLLMTLRLWSSSSRAKRSGSGVKQTLNFDLLKLAGDVESNPGPTSMDWIWRILFLVGAATGAHSFEQVQLQQPGAELVKPGASVKMSCKASGYAFSSYWINWMKQKPGQGLEWIGQIYPGDGDTNYNGKFKGRATLTADTSSSTAYMQLSSLTSEDSAVYFCARSITTVVGCAMDYWGQGTSVTVSSTREDLKNVFPPEVAVFEPSEAEISHTQKATLVCLATGFYPDHVELSWWVNGKEVHSGVCTDPQPLKEQPALNDSRYCLSSRLRVSATFWQNPRNHFRCQVQFYGLSENDEWTQDRAKPVTQIVSAEAWGRADCGFTSESYQQGVLSATILYEILLGKATLYAVLVSALVLMAMVKRKDSRG

SEQ ID NO: 23085 - skipped

SEQ ID NO: 23086 - protein, 762 aa, Artificial Sequence
  Synthetic Polypeptide
MALPVTALLLPLALLLHAARPDIQMTQSPSSLSASVGDRVTITCKASDHINNWLAWYQQKPGQAPKLLIYGATTLETGVPSRFSGSGSGTDYTLTISSLQPEDFATYYCQQSWNTPWTFGQGTKLEIKRLEDLKNVFPPEVAVFEPSEAEISHTQKATLVCLATGFYPDHVELSWWVNGKEVHSGVCTDPQPLKEQPALNDSRYCLSSRLRVSATFWQNPRNHFRCQVQFYGLSENDEWTQDRAKPVTQIVSAEAWGRADCGFTSESYQQGVLSATILYEILLGKATLYAVLVSALVLMAMVKRKDSRGRAKRSGSGATNFSLLKQAGDVEENPGPTSATMDWIWRILFLVGAATGAHSGPEVQLVESGGGLVQPGGSLRLSCAASGSIFGFNDMAWYRQAPGKQRELVALISRVGVTSSADSVKGRFTISRVNAKDTVYLQMNSLKPEDTAVYYCYMDQRLDGSTLAYWGQGTQVTVSSGSGGGGSGGGGSGGGGSFEQVQLQQPGAELVKPGASVKMSCKASGYAFSSYWINWMKQKPGQGLEWIGQIYPGDGDTNYNGKFKGRATLTADTSSSTAYMQLSSLTSEDSAVYFCARSITTVVGCAMDYWGQGTSVTVSSTRIQNPDPAVYQLRDSKSSDKSVCLFTDFDSQTNVSQSKDSDVYITDKCVLDMRSMDFKSNSAVAWSNKSDFACANAFNNSIIPEDTFFPSPESSCDVKLVEKSFETDTNLNFQNLSVIGFRILLLKVAGFNLLMTLRLWSS

SEQ ID NO: 23087-23088 - skipped (2 entries)

SEQ ID NO: 23089 - protein, 9 aa, Artificial Sequence
  Synthetic Polypeptide
GGGGGGGGG

SEQ ID NO: 23090 - protein, 901 aa, Artificial Sequence
  Synthetic Polypeptide
MALPVTALLLPLALLLHAARPDIQMTQSPSSLSASVGDRVTITCKASDHINNWLAWYQQKPGQAPKLLIYGATTLETGVPSRFSGSGSGTDYTLTISSLQPEDFATYYCQQSWNTPWTFGQGTKLEIKRLEDLKNVFPPEVAVFEPSEAEISHTQKATLVCLATGFYPDHVELSWWVNGKEVHSGVCTDPQPLKEQPALNDSRYCLSSRLRVSATFWQNPRNHFRCQVQFYGLSENDEWTQDRAKPVTQIVSAEAWIPEDTFFPSPESSCDVKLVEKSFETDTNLNFQNLSVIGFRILLLKVAGFNLLMTLRLWSSRAKRSGSGVKQTLNFDLLKLAGDVESNPGPSSMDWIWRILFLVGAATGAHSFEQVQLQQPGAELVKPGASVKMSCKASGYAFSSYWINWMKQKPGQGLEWIGQIYPGDGDTNYNGKFKGRATLTADTSSSTAYMQLSSLTSEDSAVYFCARSITTVVGCAMDYWGQGTSVTVSSTREDLKNVFPPEVAVFEPSKAEIAHTQKATLVCLATGFYPDHVELSWWVNGKEVHSGVCTDPQPLKEQPALNDSRYCLSSRLRVSATFWQNPRNHFRCQVQFYGLSENDEWTQDRAKPVTQIVSAEAWGRADCGITSASYHQGVLSATILYEILLGKATLYAVLVSALVLMAMVKRKDSRGRAKRSGSGATNFSLLKQAGDVEENPGPSRGHMTEYKPTVRLATRDDVPRAVRTLAAAFADYPATRHTVDPDRHIERVTELQELFLTRVGLDIGKVWVADDGAAVAVWTTPESVEAGAVFAEIGPRMAELSGSRLAAQQQMEGLLAPHRPKEPAWFLATVGVSPDHQGKGLGSAVVLPGVEAAERAGVPAFLETSAPRNLPFYERLGFTVTADVEVPEGPRTWCMTRKPGA

SEQ ID NO: 23091 - protein, 901 aa, Artificial Sequence; identical to SEQ ID NO: 23090
  Synthetic Polypeptide

SEQ ID NO: 23092 - protein, 907 aa, Artificial Sequence
  Synthetic Polypeptide
MALPVTALLLPLALLLHAARPDIQMTQSPSSLSASVGDRVTITCKASDHINNWLAWYQQKPGQAPKLLIYGATTLETGVPSRFSGSGSGTDYTLTISSLQPEDFATYYCQQSWNTPWTFGQGTKLEIKRLEGKPIPNPLLGLDSTGSGDKQLDADVSPKPTIFLPSIAETKLQKAGTYLCLLEKFFPDVIKIHWQEKKSNTILGSQEGNTMKTNDTYMKFSWLTVPEKSLDKEHRCIVRHENNKNGVDQEIIFPEVKTDSTDHVKPKETENTKQPSKSCHKPKAIVHTEKVNMMSLTVLGLRMLFAKTVAVNFLLTAKLFFLRAKRSGSGVKQTLNFDLLKLAGDVESNPGPSSMDWIWRILFLVGAATGAHSFEQVQLQQPGAELVKPGASVKMSCKASGYAFSSYWINWMKQKPGQGLEWIGQIYPGDGDTNYNGKFKGRATLTADTSSSTAYMQLSSLTSEDSAVYFCARSITTVVGCAMDYWGQGTSVTVSSTREDLKNVFPPEVAVFEPSKAEIAHTQKATLVCLATGFYPDHVELSWWVNGKEVHSGVCTDPQPLKEQPALNDSRYCLSSRLRVSATFWQNPRNHFRCQVQFYGLSENDEWTQDRAKPVTQIVSAEAWGRADCGITSASYHQGVLSATILYEILLGKATLYAVLVSALVLMAMVKRKDSRGRAKRSGSGATNFSLLKQAGDVEENPGPSRGHMTEYKPTVRLATRDDVPRAVRTLAAAFADYPATRHTVDPDRHIERVTELQELFLTRVGLDIGKVWVADDGAAVAVWTTPESVEAGAVFAEIGPRMAELSGSRLAAQQQMEGLLAPHRPKEPAWFLATVGVSPDHQGKGLGSAVVLPGVEAAERAGVPAFLETSAPRNLPFYERLGFTVTADVEVPEGPRTWCMTRKPGA

SEQ ID NO: 23093 - protein, 832 aa, Artificial Sequence
  Synthetic Polypeptide
MALPVTALLLPLALLLHAARPDIQMTQSPSSLSASVGDRVTITCKASDHINNWLAWYQQKPGQAPKLLIYGATTLETGVPSRFSGSGSGTDYTLTISSLQPEDFATYYCQQSWNTPWTFGQGTKLEIKRLEIQNPDPAVYQLRDSKSSDKSVCLFTDFDSQTNVSQSKDSDVYITDKCVLDMRSMDFKSNSAVAWSNKSDFACANAFNNSIIPEDTFFPSSDVPCDVKLVEKSFETDTNLNFQNLSVIGFRILLLKVAGFNLLMTLRLWSSRAKRSGSGVKQTLNFDLLKLAGDVESNPGPTSMDWIWRILFLVGAATGAHSFEQVQLQQPGAELVKPGASVKMSCKASGYAFSSYWINWMKQKPGQGLEWIGQIYPGDGDTNYNGKFKGRATLTADTSSSTAYMQLSSLTSEDSAVYFCARSITTVVGCAMDYWGQGTSVTVSSTRIQNPDPAVYQLRDSKSSDKSVCLFTDFDSQTNVSQSKDSDVYITDKCVLDMRSMDFKSNSAVAWSNKSDFACANAFNNSIGRADCGFTSESYQQGVLSATILYEILLGKATLYAVLVSALVLMAMVKRKDSRGRAKRSGSGATNFSLLKQAGDVEENPGPTSMDWIWRILFLVGAATGAHSFARGHMTEYKPTVRLATRDDVPRAVRTLAAAFADYPATRHTVDPDRHIERVTELQELFLTRVGLDIGKVWVADDGAAVAVWTTPESVEAGAVFAEIGPRMAELSGSRLAAQQQMEGLLAPHRPKEPAWFLATVGVSPDHQGKGLGSAVVLPGVEAAERAGVPAFLETSAPRNLPFYERLGFTVTADVEVPEGPRTWCMTRKPGA

SEQ ID NO: 23094 - protein, 832 aa, Artificial Sequence; identical to SEQ ID NO: 23093
  Synthetic Polypeptide

SEQ ID NO: 23095 - protein, 851 aa, Artificial Sequence
  Synthetic Polypeptide
MALPVTALLLPLALLLHAARPDIQMTQSPSSLSASVGDRVTITCKASDHINNWLAWYQQKPGQAPKLLIYGATTLETGVPSRFSGSGSGTDYTLTISSLQPEDFATYYCQQSWNTPWTFGQGTKLEIKRLEIQNPDPAVYQLRDSKSSDKSVCLFTDFDSQTNVSQSKDSDVYITDKCVLDMRSMDFKSNSAVAWSNKSDFACANAFNNSIIPEDTFFPSSDVPCDVKLVEKSFETDTNLNFQNLSVIGFRILLLKVAGFNLLMTLRLWSSRAKRSGSGVKQTLNFDLLKLAGDVESNPGPTSMDWIWRILFLVGAATGAHSFEQVQLQQPGAELVKPGASVKMSCKASGYAFSSYWINWMKQKPGQGLEWIGQIYPGDGDTNYNGKFKGRATLTADTSSSTAYMQLSSLTSEDSAVYFCARSITTVVGCAMDYWGQGTSVTVSSTRSQPHTKPSVFVMKNGTNVACLVKEFYPKDIRINLVSSKKITEFDPAIVISPSGKYNAVKLGKYEDSNSVTCSVQHDNKTVHSTDFPIKTDVITMDPKDNCSKDANDTLLLQLTNTSAYYMYLLLLLKSVVYFAIITCCLLRRTAFCCNGEKSRAKRSGSGATNFSLLKQAGDVEENPGPTSMDWIWRILFLVGAATGAHSFARGHMTEYKPTVRLATRDDVPRAVRTLAAAFADYPATRHTVDPDRHIERVTELQELFLTRVGLDIGKVWVADDGAAVAVWTTPESVEAGAVFAEIGPRMAELSGSRLAAQQQMEGLLAPHRPKEPAWFLATVGVSPDHQGKGLGSAVVLPGVEAAERAGVPAFLETSAPRNLPFYERLGFTVTADVEVPEGPRTWCMTRKPGA

SEQ ID NO: 23096 - protein, 855 aa, Artificial Sequence
  Synthetic Polypeptide
MALPVTALLLPLALLLHAARPDIQMTQSPSSLSASVGDRVTITCKASDHINNWLAWYQQKPGQAPKLLIYGATTLETGVPSRFSGSGSGTDYTLTISSLQPEDFATYYCQQSWNTPWTFGQGTKLEIKRLEDLKNVFPPEVAVFEPSEAEISHTQKATLVCLATGFYPDHVELSWWVNGKEVHSGVCTDPQPLKEQPALNDSRYCLSSRLRVSATFWQNPRNHFRCQVQFYGLSENDEWTQDRAKPVTQIVSAEAWIPEDTFFPSPESSCDVKLVEKSFETDTNLNFQNLSVIGFRILLLKVAGFNLLMTLRLWSSRAKRSGSGVKQTLNFDLLKLAGDVESNPGPSSMDWIWRILFLVGAATGAHSFEQVQLQQPGAELVKPGASVKMSCKASGYAFSSYWINWMKQKPGQGLEWIGQIYPGDGDTNYNGKFKGRATLTADTSSSTAYMQLSSLTSEDSAVYFCARSITTVVGCAMDYWGQGTSVTVSSTRIQNPDPAVYQLRDSKSSDKSVCLFTDFDSQTNVSQSKDSDVYITDKCVLDMRSMDFKSNSAVAWSNKSDFACANAFNNSIGRADCGFTSESYQQGVLSATILYEILLGKATLYAVLVSALVLMAMVKRKDSRGRAKRSGSGATNFSLLKQAGDVEENPGPTRGHMTEYKPTVRLATRDDVPRAVRTLAAAFADYPATRHTVDPDRHIERVTELQELFLTRVGLDIGKVWVADDGAAVAVWTTPESVEAGAVFAEIGPRMAELSGSRLAAQQQMEGLLAPHRPKEPAWFLATVGVSPDHQGKGLGSAVVLPGVEAAERAGVPAFLETSAPRNLPFYERLGFTVTADVEVPEGPRTWCMTRKPGA

SEQ ID NO: 23097 - protein, 880 aa, Artificial Sequence
  Synthetic Polypeptide
MALPVTALLLPLALLLHAARPDIQMTQSPSSLSASVGDRVTITCKASDHINNWLAWYQQKPGQAPKLLIYGATTLETGVPSRFSGSGSGTDYTLTISSLQPEDFATYYCQQSWNTPWTFGQGTKLEIKRLEGKPIPNPLLGLDSTGSGDKQLDADVSPKPTIFLPSIAETKLQKAGTYLCLLEKFFPDVIKIHWQEKKSNTILGSQEGNTMKTNDTYMKFSWLTVPEKSLDKEHRCIVRHENNKNGVDQEIIFPEVKTDSTDHVKPKETENTKQPSKSCHKPKAIVHTEKVNMMSLTVLGLRMLFAKTVAVNFLLTAKLFFLRAKRSGSGVKQTLNFDLLKLAGDVESNPGPSSMDWIWRILFLVGAATGAHSFEQVQLQQPGAELVKPGASVKMSCKASGYAFSSYWINWMKQKPGQGLEWIGQIYPGDGDTNYNGKFKGRATLTADTSSSTAYMQLSSLTSEDSAVYFCARSITTVVGCAMDYWGQGTSVTVSSTRSQPHTKPSVFVMKNGTNVACLVKEFYPKDIRINLVSSKKITEFDPAIVISPSGKYNAVKLGKYEDSNSVTCSVQHDNKTVHSTDFPIKTDVITMDPKDNCSKDANDTLLLQLTNTSAYYMYLLLLLKSVVYFAIITCCLLRRTAFCCNGEKSRAKRSGSGATNFSLLKQAGDVEENPGPTRGHMTEYKPTVRLATRDDVPRAVRTLAAAFADYPATRHTVDPDRHIERVTELQELFLTRVGLDIGKVWVADDGAAVAVWTTPESVEAGAVFAEIGPRMAELSGSRLAAQQQMEGLLAPHRPKEPAWFLATVGVSPDHQGKGLGSAVVLPGVEAAERAGVPAFLETSAPRNLPFYERLGFTVTADVEVPEGPRTWCMTRKPGA

SEQ ID NO: 23098 - protein, 863 aa, Artificial Sequence
  Synthetic Polypeptide
MALPVTALLLPLALLLHAARPDIQMTQSPSSLSASVGDRVTITCKASDHINNWLAWYQQKPGQAPKLLIYGATTLETGVPSRFSGSGSGTDYTLTISSLQPEDFATYYCQQSWNTPWTFGQGTKLEIKRLEDKQLDADVSPKPTIFLPSIAETKLQKAGTYLCLLEKFFPDVIKIHWQEKKSNTILGSQEGNTMKTNDTYMKFSWLTVPEKSLDKEHRCIVRHENNKNGVDQEIIFPEVKTDSTDHVKPKETENTKQPSKSCHKPKAIVHTEKVNMMSLTVLGLRMLFAKTVAVNFLLTAKLFFLRAKRSGSGVKQTLNFDLLKLAGDVESNPGPTSMDWIWRILFLVGAATGAHSFEQVQLQQPGAELVKPGASVKMSCKASGYAFSSYWINWMKQKPGQGLEWIGQIYPGDGDTNYNGKFKGRATLTADTSSSTAYMQLSSLTSEDSAVYFCARSITTVVGCAMDYWGQGTSVTVSSTRSQPHTKPSVFVMKNGTNVACLVKEFYPKDIRINLVSSKKITEFDPAIVISPSGKYNAVKLGKYEDSNSVTCSVQHDNKTVHSTDFPIKTDVITMDPKDNCSKDANDTLLLQLTNTSAYYMYLLLLLKSVVYFAIITCCLLRRTAFCCNGEKSRAKRSGSGATNFSLLKQAGDVEENPGPSRGHMTEYKPTVRLATRDDVPRAVRTLAAAFADYPATRHTVDPDRHIERVTELQELFLTRVGLDIGKVWVADDGAAVAVWTTPESVEAGAVFAEIGPRMAELSGSRLAAQQQMEGLLAPHRPKEPAWFLATVGVSPDHQGKGLGSAVVLPGVEAAERAGVPAFLETSAPRNLPFYERLGFTVTADVEVPEGPRTWCMTRKPGA

SEQ ID NO: 23099 - protein, 858 aa, Artificial Sequence
  Synthetic Polypeptide
MALPVTALLLPLALLLHAARPDIQMTQSPSSLSASVGDRVTITCKASDHINNWLAWYQQKPGQAPKLLIYGATTLETGVPSRFSGSGSGTDYTLTISSLQPEDFATYYCQQSWNTPWTFGQGTKLEIKRLEADVSPKPTIFLPSIAETKLQKAGTYLCLLEKFFPDVIKIHWQEKKSNTILGSQEGNTMKTNDTYMKFSWLTVPEKSLDKEHRCIVRHENNKNGVDQEIIFPEVKTDSTDHVKPKETENTKQPSKSCHKPKAIVHTEKVNMMSLTVLGLRMLFAKTVAVNFLLTAKLFFLRAKRSGSGVKQTLNFDLLKLAGDVESNPGPTSMDWIWRILFLVGAATGAHSFEQVQLQQPGAELVKPGASVKMSCKASGYAFSSYWINWMKQKPGQGLEWIGQIYPGDGDTNYNGKFKGRATLTADTSSSTAYMQLSSLTSEDSAVYFCARSITTVVGCAMDYWGQGTSVTVSSTRSQPHTKPSVFVMKNGTNVACLVKEFYPKDIRINLVSSKKITEFDPAIVISPSGKYNAVKLGKYEDSNSVTCSVQHDNKTVHSTDFPIKTDVITMDPKDNCSKDANDTLLLQLTNTSAYYMYLLLLLKSVVYFAIITCCLLRRTAFCCNGEKSRAKRSGSGATNFSLLKQAGDVEENPGPSRGHMTEYKPTVRLATRDDVPRAVRTLAAAFADYPATRHTVDPDRHIERVTELQELFLTRVGLDIGKVWVADDGAAVAVWTTPESVEAGAVFAEIGPRMAELSGSRLAAQQQMEGLLAPHRPKEPAWFLATVGVSPDHQGKGLGSAVVLPGVEAAERAGVPAFLETSAPRNLPFYERLGFTVTADVEVPEGPRTWCMTRKPGA

SEQ ID NO: 23100 - protein, 9 aa, Artificial Sequence
  Synthetic Polypeptide
GGGGGGGGG

SEQ ID NO: 23101 - protein, 1049 aa, Artificial Sequence
  Synthetic Polypeptide
MALPVTALLLPLALLLHAARPACLFNQEVQIPLTESYCGPCPKNWICYKNNCYQFFDESKNWYESQASCMSQNASLLKVYSKEDQDLLKLVKSAHWMGLVHIPTNGSWQWEDGSILSPNLLTIIEMQKGDCALYASSFKGYIENCSTPNTYICMQRTVLEGQPKANPTVTLFPPSSEELQANKATLVCLISDFYPGAVTVAWKADGSPVKAGVETTKPSKQSNNKYAASSYLSLTPEQWKSHRSYSCQVTHEGSTVEKTVAPTECSPIKTDVITMDPKDNCSKDANDTLLLQLTNTSAYYMYLLLLLKSVVYFAIITCCLLRRTAFCCNGEKSRAKRSGSGATNFSLLKQAGDVEENPGPTSATMDWIWRILFLVGAATGAHSGPQVQLQESGGGLAQAGGSLRLSCAASGRTFSMGWFRQAPGKEREFVAAITYSGGSPYYASSVRGRFTISRDNAKNTVYLQMNSLKPEDTAVYYCAANPTYGSDWNAENWGQGTQVTVSSGSGGGGSGGGGSGGGGSFEQVQLQQPGAELVKPGASVKMSCKASGYAFSSYWINWMKQKPGQGLEWIGQIYPGDGDTNYNGKFKGRATLTADTSSSTAYMQLSSLTSEDSAVYFCARSITTVVGCAMDYWGQGTSVTVSSTRASTKGPSVFPLAPSSKSTSGGTAALGCLVKDYFPEPVTVSWNSGALTSGVHTFPAVLQSSGLYSLSSVVTVPSSSLGTQTYICNVNHKPSNTKVDKRVEPKSCEVKTDSTDHVKPKETENTKQPSKSCHKPKAIVHTEKVNMMSLTVLGLRMLFAKTVAVNFLLTAKLFFLRAKRSGSGVKQTLNFDLLKLAGDVESNPGPSRGHMTEYKPTVRLATRDDVPRAVRTLAAAFADYPATRHTVDPDRHIERVTELQELFLTRVGLDIGKVWVADDGAAVAVWTTPESVEAGAVFAEIGPRMAELSGSRLAAQQQMEGLLAPHRPKEPAWFLATVGVSPDHQGKGLGSAVVLPGVEAAERAGVPAFLETSAPRNLPFYERLGFTVTADVEVPEGPRTWCMTRKPGA

SEQ ID NO: 23102 - protein, 1303 aa, Artificial Sequence
  Synthetic Polypeptide
MALPVTALLLPLALLLHAARPACEVQLLESGGGLIQPGGSLRLSCAASGFTFSSHAMTWVRQAPGKGLEWVSAISGSGDYTHYADSVKGRFTISRDNSKNTVYLQMNSLRAEDSAVYYCAKDEDGGSLLGHRGQGTLVTVSSGTGGGGSGGGGSGGGGSEFDIQMTQSPSSLSASVGDRVTITCKASDHINNWLAWYQQKPGQAPKLLIYGATTLETGVPSRFSGSGSGTDYTLTISSLQPEDFATYYCQQSWNTPWTFGQGTKLEIKRLEGQPKANPTVTLFPPSSEELQANKATLVCLISDFYPGAVTVAWKADGSPVKAGVETTKPSKQSNNKYAASSYLSLTPEQWKSHRSYSCQVTHEGSTVEKTVAPTECSGRADCGFTSESYQQGVLSATILYEILLGKATLYAVLVSALVLMAMVKRKDSRGRAKRSGSGATNFSLLKQAGDVEENPGPTSTMDWIWRILFLVGAATGAHSLFNQEVQIPLTESYCGPCPKNWICYKNNCYQFFDESKNWYESQASCMSQNASLLKVYSKEDQDLLKLVKSAHWMGLVHIPTNGSWQWEDGSILSPNLLTIIEMQKGDCALYASSFKGYIENCSTPNTYICMQRTVSGGGGSGGGGSGGGGDLFNQEVQIPLTESYCGPCPKNWICYKNNCYQFFDESKNWYESQASCMSQNASLLKVYSKEDQDLLKLVKSAHWMGLVHIPTNGSWQWEDGSILSPNLLTIIEMQKGDCALYASSFKGYIENCSTPNTYICMQRTVGSGGGGSGGGGSGGGGSFEQVQLQQPGAELVKPGASVKMSCKASGYAFSSYWINWMKQKPGQGLEWIGQIYPGDGDTNYNGKFKGRATLTADTSSSTAYMQLSSLTSEDSAVYFCARSITTVVGCAMDYWGQGTSVTVSSTRASTKGPSVFPLAPSSKSTSGGTAALGCLVKDYFPEPVTVSWNSGALTSGVHTFPAVLQSSGLYSLSSVVTVPSSSLGTQTYICNVNHKPSNTKVDKRVEPKSCIPEDTFFPSPESSCDVKLVEKSFETDTNLNFQNLSVIGFRILLLKVAGFNLLMTLRLWSSRAKRSGSGVKQTLNFDLLKLAGDVESNPGPSRGHMTEYKPTVRLATRDDVPRAVRTLAAAFADYPATRHTVDPDRHIERVTELQELFLTRVGLDIGKVWVADDGAAVAVWTTPESVEAGAVFAEIGPRMAELSGSRLAAQQQMEGLLAPHRPKEPAWFLATVGVSPDHQGKGLGSAVVLPGVEAAERAGVPAFLETSAPRNLPFYERLGFTVTADVEVPEGPRTWCMTRKPGA

SEQ ID NO: 23103 - protein, 1064 aa, Artificial Sequence
  Synthetic Polypeptide
MALPVTALLLPLALLLHAARPACLFNQEVQIPLTESYCGPCPKNWICYKNNCYQFFDESKNWYESQASCMSQNASLLKVYSKEDQDLLKLVKSAHWMGLVHIPTNGSWQWEDGSILSPNLLTIIEMQKGDCALYASSFKGYIENCSTPNTYICMQRTVLEGQPKANPTVTLFPPSSEELQANKATLVCLISDFYPGAVTVAWKADGSPVKAGVETTKPSKQSNNKYAASSYLSLTPEQWKSHRSYSCQVTHEGSTVEKTVAPTECSPIKTDVITMDPKDNCSKDANDTLLLQLTNTSAYYMYLLLLLKSVVYFAIITCCLLRRTAFCCNGEKSRAKRSGSGATNFSLLKQAGDVEENPGPTSATMDWIWRILFLVGAATGAHSGPQVQLQESGGGLAQAGGSLRLSCAASGRTFSMGWFRQAPGKEREFVAAITYSGGSPYYASSVRGRFTISRDNAKNTVYLQMNSLKPEDTAVYYCAANPTYGSDWNAENWGQGTQVTVSSGSGGGGSGGGGSGGGGSFEDLFNQEVQIPLTESYCGPCPKNWICYKNNCYQFFDESKNWYESQASCMSQNASLLKVYSKEDQDLLKLVKSAHWMGLVHIPTNGSWQWEDGSILSPNLLTIIEMQKGDCALYASSFKGFIENCSTPNTYICMQRTVTRASTKGPSVFPLAPSSKSTSGGTAALGCLVKDYFPEPVTVSWNSGALTSGVHTFPAVLQSSGLYSLSSVVTVPSSSLGTQTYICNVNHKPSNTKVDKRVEPKSCEVKTDSTDHVKPKETENTKQPSKSCHKPKAIVHTEKVNMMSLTVLGLRMLFAKTVAVNFLLTAKLFFLRAKRSGSGVKQTLNFDLLKLAGDVESNPGPSRGHMTEYKPTVRLATRDDVPRAVRTLAAAFADYPATRHTVDPDRHIERVTELQELFLTRVGLDIGKVWVADDGAAVAVWTTPESVEAGAVFAEIGPRMAELSGSRLAAQQQMEGLLAPHRPKEPAWFLATVGVSPDHQGKGLGSAVVLPGVEAAERAGVPAFLETSAPRNLPFYERLGFTVTADVEVPEGPRTWCMTRKPGA

SEQ ID NO: 23104 - protein, 899 aa, Artificial Sequence
  Synthetic Polypeptide
MALPVTALLLPLALLLHAARPACLFNQEVQIPLTESYCGPCPKNWICYKNNCYQFFDESKNWYESQASCMSQNASLLKVYSKEDQDLLKLVKSAHWMGLVHIPTNGSWQWEDGSILSPNLLTIIEMQKGDCALYASSFKGYIENCSTPNTYICMQRTVLEDLKNVFPPEVAVFEPSEAEISHTQKATLVCLATGFYPDHVELSWWVNGKEVHSGVCTDPQPLKEQPALNDSRYCLSSRLRVSATFWQNPRNHFRCQVQFYGLSENDEWTQDRAKPVTQIVSAEAWGRADCGFTSESYQQGVLSATILYEILLGKATLYAVLVSALVLMAMVKRKDSRGRAKRSGSGATNFSLLKQAGDVEENPGPTSMDWIWRILFLVGAATGAHSFEDLFNQEVQIPLTESYCGPCPKNWICYKNNCYQFFDESKNWYESQASCMSQNASLLKVYSKEDQDLLKLVKSAHWMGLVHIPTNGSWQWEDGSILSPNLLTIIEMQKGDCALYASSFKGFIENCSTPNTYICMQRTVTRIQNPDPAVYQLRDSKSSDKSVCLFTDFDSQTNVSQSKDSDVYITDKCVLDMRSMDFKSNSAVAWSNKSDFACANAFNNSIIPEDTFFPSPESSCDVKLVEKSFETDTNLNFQNLSVIGFRILLLKVAGFNLLMTLRLWSSRAKRSGSGVKQTLNFDLLKLAGDVESNPGPSRGHMTEYKPTVRLATRDDVPRAVRTLAAAFADYPATRHTVDPDRHIERVTELQELFLTRVGLDIGKVWVADDGAAVAVWTTPESVEAGAVFAEIGPRMAELSGSRLAAQQQMEGLLAPHRPKEPAWFLATVGVSPDHQGKGLGSAVVLPGVEAAERAGVPAFLETSAPRNLPFYERLGFTVTADVEVPEGPRTWCMTRKPGA

SEQ ID NO: 23105 - protein, 1175 aa, Artificial Sequence
  Synthetic Polypeptide
MALPVTALLLPLALLLHAARPACEVQLLESGGGLIQPGGSLRLSCAASGFTFSSHAMTWVRQAPGKGLEWVSAISGSGDYTHYADSVKGRFTISRDNSKNTVYLQMNSLRAEDSAVYYCAKDEDGGSLLGHRGQGTLVTVSSGTGGGGSGGGGSGGGGSEFDIQMTQSPSSLSASVGDRVTITCKASDHINNWLAWYQQKPGQAPKLLIYGATTLETGVPSRFSGSGSGTDYTLTISSLQPEDFATYYCQQSWNTPWTFGQGTKLEIKRLEGQPKANPTVTLFPPSSEELQANKATLVCLISDFYPGAVTVAWKADGSPVKAGVETTKPSKQSNNKYAASSYLSLTPEQWKSHRSYSCQVTHEGSTVEKTVAPTECSPIKTDVITMDPKDNCSKDANDTLLLQLTNTSAYYMYLLLLLKSVVYFAIITCCLLRRTAFCCNGEKSRAKRSGSGATNFSLLKQAGDVEENPGPTSATMDWIWRILFLVGAATGAHSGPQVQLQESGGGLAQAGGSLRLSCAASGRTFSMGWFRQAPGKEREFVAAITYSGGSPYYASSVRGRFTISRDNAKNTVYLQMNSLKPEDTAVYYCAANPTYGSDWNAENWGQGTQVTVSSGSGGGGSGGGGSGGGGSFEDLFNQEVQIPLTESYCGPCPKNWICYKNNCYQFFDESKNWYESQASCMSQNASLLKVYSKEDQDLLKLVKSAHWMGLVHIPTNGSWQWEDGSILSPNLLTIIEMQKGDCALYASSFKGFIENCSTPNTYICMQRTVTRASTKGPSVFPLAPSSKSTSGGTAALGCLVKDYFPEPVTVSWNSGALTSGVHTFPAVLQSSGLYSLSSVVTVPSSSLGTQTYICNVNHKPSNTKVDKRVEPKSCEVKTDSTDHVKPKETENTKQPSKSCHKPKAIVHTEKVNMMSLTVLGLRMLFAKTVAVNFLLTAKLFFLRAKRSGSGVKQTLNFDLLKLAGDVESNPGPSRGHMTEYKPTVRLATRDDVPRAVRTLAAAFADYPATRHTVDPDRHIERVTELQELFLTRVGLDIGKVWVADDGAAVAVWTTPESVEAGAVFAEIGPRMAELSGSRLAAQQQMEGLLAPHRPKEPAWFLATVGVSPDHQGKGLGSAVVLPGVEAAERAGVPAFLETSAPRNLPFYERLGFTVTADVEVPEGPRTWCMTRKPGA

SEQ ID NO: 23106 - protein, 949 aa, Artificial Sequence
  Synthetic Polypeptide
MALPVTALLLPLALLLHAARPDIQMTQSPSSLSASVGDRVTITCKASDHINNWLAWYQQKPGQAPKLLIYGATTLETGVPSRFSGSGSGTDYTLTISSLQPEDFATYYCQQSWNTPWTFGQGTKLEIKRLEDLKNVFPPEVAVFEPSEAEISHTQKATLVCLATGFYPDHVELSWWVNGKEVHSGVCTDPQPLKEQPALNDSRYCLSSRLRVSATFWQNPRNHFRCQVQFYGLSENDEWTQDRAKPVTQIVSAEAWGRADCGFTSESYQQGVLSATILYEILLGKATLYAVLVSALVLMAMVKRKDSRGRAKRSGSGATNFSLLKQAGDVEENPGPTSATMDWIWRILFLVGAATGAHSGPMGSWLEFYHRLNAIDSRLWALGGSEAELAAFEKEIAAFESELQAYKGKGNPEVESLRDHAAHIREWLQAYRHNGSGGGGSGGGGSGGGGSFEQVQLQQPGAELVKPGASVKMSCKASGYAFSSYWINWMKQKPGQGLEWIGQIYPGDGDTNYNGKFKGRATLTADTSSSTAYMQLSSLTSEDSAVYFCARSITTVVGCAMDYWGQGTSVTVSSTRIQNPDPAVYQLRDSKSSDKSVCLFTDFDSQTNVSQSKDSDVYITDKCVLDMRSMDFKSNSAVAWSNKSDFACANAFNNSIIPEDTFFPSPESSCDVKLVEKSFETDTNLNFQNLSVIGFRILLLKVAGFNLLMTLRLWSSRAKRSGSGVKQTLNFDLLKLAGDVESNPGPSRGHMTEYKPTVRLATRDDVPRAVRTLAAAFADYPATRHTVDPDRHIERVTELQELFLTRVGLDIGKVWVADDGAAVAVWTTPESVEAGAVFAEIGPRMAELSGSRLAAQQQMEGLLAPHRPKEPAWFLATVGVSPDHQGKGLGSAVVLPGVEAAERAGVPAFLETSAPRNLPFYERLGFTVTADVEVPEGPRTWCMTRKPGA

SEQ ID NO: 23107 - protein, 949 aa, Artificial Sequence
  Synthetic Polypeptide
MALPVTALLLPLALLLHAARPACMGSWFEFYDRLNAIDARLWALGGSEAELAAFEKEIAAFESELQAYKGKGNPEVENLRVHAAAIREWLQAYRHNGTGGGGSGGGGSGGGGSEFDIQMTQSPSSLSASVGDRVTITCKASDHINNWLAWYQQKPGQAPKLLIYGATTLETGVPSRFSGSGSGTDYTLTISSLQPEDFATYYCQQSWNTPWTFGQGTKLEIKRLEDLKNVFPPEVAVFEPSEAEISHTQKATLVCLATGFYPDHVELSWWVNGKEVHSGVCTDPQPLKEQPALNDSRYCLSSRLRVSATFWQNPRNHFRCQVQFYGLSENDEWTQDRAKPVTQIVSAEAWGRADCGFTSESYQQGVLSATILYEILLGKATLYAVLVSALVLMAMVKRKDSRGRAKRSGSGATNFSLLKQAGDVEENPGPTSMDWIWRILFLVGAATGAHSFEQVQLQQPGAELVKPGASVKMSCKASGYAFSSYWINWMKQKPGQGLEWIGQIYPGDGDTNYNGKFKGRATLTADTSSSTAYMQLSSLTSEDSAVYFCARSITTVVGCAMDYWGQGTSVTVSSTRIQNPDPAVYQLRDSKSSDKSVCLFTDFDSQTNVSQSKDSDVYITDKCVLDMRSMDFKSNSAVAWSNKSDFACANAFNNSIIPEDTFFPSPESSCDVKLVEKSFETDTNLNFQNLSVIGFRILLLKVAGFNLLMTLRLWSSRAKRSGSGVKQTLNFDLLKLAGDVESNPGPSRGHMTEYKPTVRLATRDDVPRAVRTLAAAFADYPATRHTVDPDRHIERVTELQELFLTRVGLDIGKVWVADDGAAVAVWTTPESVEAGAVFAEIGPRMAELSGSRLAAQQQMEGLLAPHRPKEPAWFLATVGVSPDHQGKGLGSAVVLPGVEAAERAGVPAFLETSAPRNLPFYERLGFTVTADVEVPEGPRTWCMTRKPGA

SEQ ID NO: 23108 - protein, 1066 aa, Artificial Sequence
  Synthetic Polypeptide
MALPVTALLLPLALLLHAARPACMDPDLEIRAAFLRQRNTALRTEVAELEQEVQRLENEVSQYETRYGPLGGGKGTGGGGSGGGGSGGGGSEFDIQMTQSPSSLSASVGDRVTITCKASDHINNWLAWYQQKPGQAPKLLIYGATTLETGVPSRFSGSGSGTDYTLTISSLQPEDFATYYCQQSWNTPWTFGQGTKLEIKRLEDLKNVFPPEVAVFEPSEAEISHTQKATLVCLATGFYPDHVELSWWVNGKEVHSGVCTDPQPLKEQPALNDSRYCLSSRLRVSATFWQNPRNHFRCQVQFYGLSENDEWTQDRAKPVTQIVSAEAWGRADCGFTSESYQQGVLSATILYEILLGKATLYAVLVSALVLMAMVKRKDSRGRAKRSGSGATNFSLLKQAGDVEENPGPTSATMDWIWRILFLVGAATGAHSGPEVQLVESGGGLVQAGGSLRLSCAASGRTFSMGWFRQAPGKEREFVAAITYSGGSPYYADSVKGRFTISRDNAKNTVYLQMNSLKPEDTAVYYCAANPTYGSDWNAENWGQGTQVTVSSGSGGGGSGGGGSGGGGSFEQVQLQQPGAELVKPGASVKMSCKASGYAFSSYWINWMKQKPGQGLEWIGQIYPGDGDTNYNGKFKGRATLTADTSSSTAYMQLSSLTSEDSAVYFCARSITTVVGCAMDYWGQGTSVTVSSTRIQNPDPAVYQLRDSKSSDKSVCLFTDFDSQTNVSQSKDSDVYITDKCVLDMRSMDFKSNSAVAWSNKSDFACANAFNNSIIPEDTFFPSPESSCDVKLVEKSFETDTNLNFQNLSVIGFRILLLKVAGFNLLMTLRLWSSRAKRSGSGVKQTLNFDLLKLAGDVESNPGPSRGHMTEYKPTVRLATRDDVPRAVRTLAAAFADYPATRHTVDPDRHIERVTELQELFLTRVGLDIGKVWVADDGAAVAVWTTPESVEAGAVFAEIGPRMAELSGSRLAAQQQMEGLLAPHRPKEPAWFLATVGVSPDHQGKGLGSAVVLPGVEAAERAGVPAFLETSAPRNLPFYERLGFTVTADVEVPEGPRTWCMTRKPGA

SEQ ID NO: 23109 - protein, 596 aa, Artificial Sequence
  Synthetic Polypeptide
MALPVTALLLPLALLLHAARPQLQLQESGPGLVKPSETLSLTCTVSGDSISSGDYYWGWIRQPPGKGLEWIGHIYYSGVTYYNPSLKSRVTISVDTSRNQFSLKLSSVTAADTAVYYCTREDSSNWRSRGQGTLVTVSSLEGSIPEDTFFPSPESSCDVKLVEKSFETDTNLNFQNLSVIGFRILLLKVAGFNLLMTLRLWSSRAKRSGSGVKQTLNFDLLKLAGDVESNPGPTSATMDWIWRILFLVGAATGAHSEFMDPDLEIRAAFLRQRNTALRTEVAELEQEVQRLENEVSQYETRYGPLGGGKTRGSGRADCGFTSESYQQGVLSATILYEILLGKATLYAVLVSALVLMAMVKRKDSRGRAKRSGSGATNFSLLKQAGDVEENPGPSRGHMTEYKPTVRLATRDDVPRAVRTLAAAFADYPATRHTVDPDRHIERVTELQELFLTRVGLDIGKVWVADDGAAVAVWTTPESVEAGAVFAEIGPRMAELSGSRLAAQQQMEGLLAPHRPKEPAWFLATVGVSPDHQGKGLGSAVVLPGVEAAERAGVPAFLETSAPRNLPFYERLGFTVTADVEVPEGPRTWCMTRKPGA

SEQ ID NO: 23110 - protein, 949 aa, Artificial Sequence
  Synthetic Polypeptide
MALPVTALLLPLALLLHAARPDIQMTQSPSSLSASVGDRVTITCKASDHINNWLAWYQQKPGQAPKLLIYGATTLETGVPSRFSGSGSGTDYTLTISSLQPEDFATYYCQQSWNTPWTFGQGTKLEIKRLEDLKNVFPPEVAVFEPSEAEISHTQKATLVCLATGFYPDHVELSWWVNGKEVHSGVCTDPQPLKEQPALNDSRYCLSSRLRVSATFWQNPRNHFRCQVQFYGLSENDEWTQDRAKPVTQIVSAEAWGRADCGFTSESYQQGVLSATILYEILLGKATLYAVLVSALVLMAMVKRKDSRGRAKRSGSGATNFSLLKQAGDVEENPGPTSATMDWIWRILFLVGAATGAHSGPMGSWSEFYDRLHAIHHRLYALGGSEAELAAFEKEIAAFESELQAYKGKGNPEVEALRDTAAFIRTRLQAYRHNGSGGGGSGGGGSGGGGSFEQVQLQQPGAELVKPGASVKMSCKASGYAFSSYWINWMKQKPGQGLEWIGQIYPGDGDTNYNGKFKGRATLTADTSSSTAYMQLSSLTSEDSAVYFCARSITTVVGCAMDYWGQGTSVTVSSTRIQNPDPAVYQLRDSKSSDKSVCLFTDFDSQTNVSQSKDSDVYITDKCVLDMRSMDFKSNSAVAWSNKSDFACANAFNNSIIPEDTFFPSPESSCDVKLVEKSFETDTNLNFQNLSVIGFRILLLKVAGFNLLMTLRLWSSRAKRSGSGVKQTLNFDLLKLAGDVESNPGPSRGHMTEYKPTVRLATRDDVPRAVRTLAAAFADYPATRHTVDPDRHIERVTELQELFLTRVGLDIGKVWVADDGAAVAVWTTPESVEAGAVFAEIGPRMAELSGSRLAAQQQMEGLLAPHRPKEPAWFLATVGVSPDHQGKGLGSAVVLPGVEAAERAGVPAFLETSAPRNLPFYERLGFTVTADVEVPEGPRTWCMTRKPGA

SEQ ID NO: 23111 - protein, 1159 aa, Artificial Sequence
  Synthetic Polypeptide
MALPVTALLLPLALLLHAARPDIQMTQSPSSLSASVGDRVTITCKASDHINNWLAWYQQKPGQAPKLLIYGATTLETGVPSRFSGSGSGTDYTLTISSLQPEDFATYYCQQSWNTPWTFGQGTKLEIKRLEDLKNVFPPEVAVFEPSEAEISHTQKATLVCLATGFYPDHVELSWWVNGKEVHSGVCTDPQPLKEQPALNDSRYCLSSRLRVSATFWQNPRNHFRCQVQFYGLSENDEWTQDRAKPVTQIVSAEAWGRADCGFTSESYQQGVLSATILYEILLGKATLYAVLVSALVLMAMVKRKDSRGRAKRSGSGATNFSLLKQAGDVEENPGPTSTMDWIWRILFLVGAATGAHSLFNQEVQIPLTESYCGPCPKNWICYKNNCYQFFDESKNWYESQASCMSQNASLLKVYSKEDQDLLKLVKSAHWMGLVHIPTNGSWQWEDGSILSPNLLTIIEMQKGDCALYASSFKGYIENCSTPNTYICMQRTVSGGGGSGGGGSGGGGDLFNQEVQIPLTESYCGPCPKNWICYKNNCYQFFDESKNWYESQASCMSQNASLLKVYSKEDQDLLKLVKSAHWMGLVHIPTNGSWQWEDGSILSPNLLTIIEMQKGDCALYASSFKGYIENCSTPNTYICMQRTVGSGGGGSGGGGSGGGGSFEQVQLQQPGAELVKPGASVKMSCKASGYAFSSYWINWMKQKPGQGLEWIGQIYPGDGDTNYNGKFKGRATLTADTSSSTAYMQLSSLTSEDSAVYFCARSITTVVGCAMDYWGQGTSVTVSSTRIQNPDPAVYQLRDSKSSDKSVCLFTDFDSQTNVSQSKDSDVYITDKCVLDMRSMDFKSNSAVAWSNKSDFACANAFNNSIIPEDTFFPSPESSCDVKLVEKSFETDTNLNFQNLSVIGFRILLLKVAGFNLLMTLRLWSSRAKRSGSGVKQTLNFDLLKLAGDVESNPGPSRGHMTEYKPTVRLATRDDVPRAVRTLAAAFADYPATRHTVDPDRHIERVTELQELFLTRVGLDIGKVWVADDGAAVAVWTTPESVEAGAVFAEIGPRMAELSGSRLAAQQQMEGLLAPHRPKEPAWFLATVGVSPDHQGKGLGSAVVLPGVEAAERAGVPAFLETSAPRNLPFYERLGFTVTADVEVPEGPRTWCMTRKPGA

SEQ ID NO: 23112 - protein, 9 aa, Artificial Sequence
  Synthetic Polypeptide
GGGGGGGGG

SEQ ID NO: 23113 - protein, 1153 aa, Artificial Sequence
  Synthetic Polypeptide
MALPVTALLLPLALLLHAARPDIQMTQSPSSLSASVGDRVTITCKASDHINNWLAWYQQKPGQAPKLLIYGATTLETGVPSRFSGSGSGTDYTLTISSLQPEDFATYYCQQSWNTPWTFGQGTKLEIKRGGGGSGGGGSGGGGSQVQLQQPGAELVKPGASVKMSCKASGYAFSSYWINWMKQKPGQGLEWIGQIYPGDGDTNYNGKFKGRATLTADTSSSTAYMQLSSLTSEDSAVYFCARSITTVVGCAMDYWGQGTSVTVSSTRGGGGSEPHSLSYDITVIPKFRPGPRWCAVQGQVDEKTFLHYDCGNKTVTPVSPLGKKLNVTTAWKAQNPVLREVVDILTEQLWDIQLENYTPKEPLTLQARMSCEQKAEGHSSGSWQFSFDGQIFLLFDSEKRMWTTVHPGARKMKEKWENDKVVATLLWGWSMGDCIGWLEDFLMGMDSTLEPSGSSGSGAWSHPQFEKGGGSGGGSGGSAWSHPQFEKLERAKRSGSGATNFSLLKQAGDVEENPGPEFMTTSASSHLNKGIKQVYMSLPQGEKVQAMYIWIDGTGEGLRCKTRTLDSEPKCVEELPEWNFDGSSTLQSEGSNSDMYLVPAAMFRDPFRKDPNKLVLCEVFKYNRRPAETNLRHTCKRIMDMVSNQHPWFGMEQEYTLMGTDGHPFGWPSNGFPGPQGPYYCGVGADRAYGRDIVEAHYRACLYAGVKIAGTNAEVMPAQWEFQIGPCEGISMGDHLWVARFILHRVCEDFGVIATFDPKPIPGNWNGAGCHTNFSTKAMREENGLKYIEEAIEKLSKRHQYHIRAYDPKGGLDNARRLTGFHETSNINDFSAGVANRSASIRIPRTVGQEKKGYFEDRRPSANCDPFSVTEALIRTCLLNETGDEPFQYKNTSGSGEGRGSLLTCGDVEENPGPMVSKGEELFTGVVPILVELDGDVNGHKFSVSGEGEGDATYGKLTLKFICTTGKLPVPWPTLVTTLTYGVQCFSRYPDHMKQHDFFKSAMPEGYVQERTIFFKDDGNYKTRAEVKFEGDTLVNRIELKGIDFKEDGNILGHKLEYNYNSHNVYIMADKQKNGIKVNFKIRHNIEDGSVQLADHYQQNTPIGDGPVLLPDNHYLSTQSALSKDPNEKRDHMVLLEFVTAAGITLGMDELYK

SEQ ID NO: 23114 - protein, 1040 aa, Artificial Sequence
  Synthetic Polypeptide
MALPVTALLLPLALLLHAARPACEVQLVESGGGVVQPGRSLRLSCAASGFSFSGYGMHWVRQAPGKGLEWVAYISYDGSNKYYADSVKGRFTISRDNSKNTLYLQMNSLRAEDTAVYYCAKDPAWGLRLGESSSYDFDYWGQGTMVTVSSGTTRGGGGSEPHSLSYDITVIPKFRPGPRWCAVQGQVDEKTFLHYDCGNKTVTPVSPLGKKLNVTTAWKAQNPVLREVVDILTEQLWDIQLENYTPKEPLTLQARMSCEQKAEGHSSGSWQFSFDGQIFLLFDSEKRMWTTVHPGARKMKEKWENDKVVATKLYLWSMGDCIGWLEDFLMGMDSTLEPSGSSGSGAWSHPQFEKGGGSGGGSGGSAWSHPQFEKLERAKRSGSGATNFSLLKQAGDVEENPGPEFMTTSASSHLNKGIKQVYMSLPQGEKVQAMYIWIDGTGEGLRCKTRTLDSEPKCVEELPEWNFDGSSTLQSEGSNSDMYLVPAAMFRDPFRKDPNKLVLCEVFKYNRRPAETNLRHTCKRIMDMVSNQHPWFGMEQEYTLMGTDGHPFGWPSNGFPGPQGPYYCGVGADRAYGRDIVEAHYRACLYAGVKIAGTNAEVMPAQWEFQIGPCEGISMGDHLWVARFILHRVCEDFGVIATFDPKPIPGNWNGAGCHTNFSTKAMREENGLKYIEEAIEKLSKRHQYHIRAYDPKGGLDNARRLTGFHETSNINDFSAGVANRSASIRIPRTVGQEKKGYFEDRRPSANCDPFSVTEALIRTCLLNETGDEPFQYKNTSGSGEGRGSLLTCGDVEENPGPMVSKGEELFTGVVPILVELDGDVNGHKFSVSGEGEGDATYGKLTLKFICTTGKLPVPWPTLVTTLTYGVQCFSRYPDHMKQHDFFKSAMPEGYVQERTIFFKDDGNYKTRAEVKFEGDTLVNRIELKGIDFKEDGNILGHKLEYNYNSHNVYIMADKQKNGIKVNFKIRHNIEDGSVQLADHYQQNTPIGDGPVLLPDNHYLSTQSALSKDPNEKRDHMVLLEFVTAAGITLGMDELYK

SEQ ID NO: 23115 - protein, 1150 aa, Artificial Sequence
  Synthetic Polypeptide
MALPVTALLLPLALLLHAARPDIQMTQSPSSLSASVGDRVTITCRASQGISSWLAWYQQKPGKAPKLLIYAASSLQSGVPSRFSGSGSGTDFTLTISSLQPEDFATYYCQQYNSYPLTFGQGTKVEIKRGGGGSGGGGSGGGGSEVQLVESGGGLVQPGGSLRLSCAASGFTFSDHGMHWVRQAPGKGLEWVAVIWYDGSNKYYADSVKGRFTISRDNSKNTLYLQMNSLRAEDTAVYYCARDSIMVRGDYWGQGTLVTVSSTRGGGGSEPHSLSYDITVIPKFRPGPRWCAVQGQVDEKTFLHYDCGNKTVTPVSPLGKKLNVTTAWKAQNPVLREVVDILTEQLWDIQLENYTPKEPLTLQARMSCEQKAEGHSSGSWQFSFDGQIFLLFDSEKRMWTTVHPGARKMKEKWENDKVVATKLYLWSMGDCIGWLEDFLMGMDSTLEPSGSSGSGAWSHPQFEKGGGSGGGSGGSAWSHPQFEKLERAKRSGSGATNFSLLKQAGDVEENPGPEFMTTSASSHLNKGIKQVYMSLPQGEKVQAMYIWIDGTGEGLRCKTRTLDSEPKCVEELPEWNFDGSSTLQSEGSNSDMYLVPAAMFRDPFRKDPNKLVLCEVFKYNRRPAETNLRHTCKRIMDMVSNQHPWFGMEQEYTLMGTDGHPFGWPSNGFPGPQGPYYCGVGADRAYGRDIVEAHYRACLYAGVKIAGTNAEVMPAQWEFQIGPCEGISMGDHLWVARFILHRVCEDFGVIATFDPKPIPGNWNGAGCHTNFSTKAMREENGLKYIEEAIEKLSKRHQYHIRAYDPKGGLDNARRLTGFHETSNINDFSAGVANRSASIRIPRTVGQEKKGYFEDRRPSANCDPFSVTEALIRTCLLNETGDEPFQYKNTSGSGEGRGSLLTCGDVEENPGPMVSKGEELFTGVVPILVELDGDVNGHKFSVSGEGEGDATYGKLTLKFICTTGKLPVPWPTLVTTLTYGVQCFSRYPDHMKQHDFFKSAMPEGYVQERTIFFKDDGNYKTRAEVKFEGDTLVNRIELKGIDFKEDGNILGHKLEYNYNSHNVYIMADKQKNGIKVNFKIRHNIEDGSVQLADHYQQNTPIGDGPVLLPDNHYLSTQSALSKDPNEKRDHMVLLEFVTAAGITLGMDELYK

SEQ ID NO: 23116 - protein, 1040 aa, Artificial Sequence
  Synthetic Polypeptide
MALPVTALLLPLALLLHAARPACEVQLVESGGGVVQPGRSLRLSCAASGFSFSGYGMHWVRQAPGKGLEWVAYISYDGSNKYYADSVKGRFTISRDNSKNTLYLQMNSLRAEDTAVYYCAKDPAWGLRLGESSSYDFDYWGQGTMVTVSSGTTRGGGGSEPHSLSYDITVIPKFRPGPRWCAVQGQVDEKTFLHYDCGNKTVTPVSPLGKKLNVTTAWKAQNPVLREVVDILTEQLWDIQLENYTPKEPLTLQARMSCEQKAEGHSSGSWQFSFDGQIFLLFDSEKRMWTTVHPGARKMKEKWENDKVVATLLWGWSMGDCIGWLEDFLMGMDSTLEPSGSSGSGAWSHPQFEKGGGSGGGSGGSAWSHPQFEKLERAKRSGSGATNFSLLKQAGDVEENPGPEFMTTSASSHLNKGIKQVYMSLPQGEKVQAMYIWIDGTGEGLRCKTRTLDSEPKCVEELPEWNFDGSSTLQSEGSNSDMYLVPAAMFRDPFRKDPNKLVLCEVFKYNRRPAETNLRHTCKRIMDMVSNQHPWFGMEQEYTLMGTDGHPFGWPSNGFPGPQGPYYCGVGADRAYGRDIVEAHYRACLYAGVKIAGTNAEVMPAQWEFQIGPCEGISMGDHLWVARFILHRVCEDFGVIATFDPKPIPGNWNGAGCHTNFSTKAMREENGLKYIEEAIEKLSKRHQYHIRAYDPKGGLDNARRLTGFHETSNINDFSAGVANRSASIRIPRTVGQEKKGYFEDRRPSANCDPFSVTEALIRTCLLNETGDEPFQYKNTSGSGEGRGSLLTCGDVEENPGPMVSKGEELFTGVVPILVELDGDVNGHKFSVSGEGEGDATYGKLTLKFICTTGKLPVPWPTLVTTLTYGVQCFSRYPDHMKQHDFFKSAMPEGYVQERTIFFKDDGNYKTRAEVKFEGDTLVNRIELKGIDFKEDGNILGHKLEYNYNSHNVYIMADKQKNGIKVNFKIRHNIEDGSVQLADHYQQNTPIGDGPVLLPDNHYLSTQSALSKDPNEKRDHMVLLEFVTAAGITLGMDELYK

SEQ ID NO: 23117 - protein, 1027 aa, Artificial Sequence
  Synthetic Polypeptide
MALPVTALLLPLALLLHAARPQVQLVESGGGLVQPGGSLRLSCAASGFTFTNHAMSWVRQAPGKGLELVSSISGNGRTTYYADSVKGRFTISRDISKNTLDLQMNSLRAEDTAVYYCAKDGGETLVDSRGQGTLVTVSSTRGGGGSEPHSLSYDITVIPKFRPGPRWCAVQGQVDEKTFLHYDCGNKTVTPVSPLGKKLNVTTAWKAQNPVLREVVDILTEQLWDIQLENYTPKEPLTLQARMSCEQKAEGHSSGSWQFSFDGQIFLLFDSEKRMWTTVHPGARKMKEKWENDKVVATLLWGWSMGDCIGWLEDFLMGMDSTLEPSGSSGSGAWSHPQFEKGGGSGGGSGGSAWSHPQFEKLERAKRSGSGATNFSLLKQAGDVEENPGPEFMTTSASSHLNKGIKQVYMSLPQGEKVQAMYIWIDGTGEGLRCKTRTLDSEPKCVEELPEWNFDGSSTLQSEGSNSDMYLVPAAMFRDPFRKDPNKLVLCEVFKYNRRPAETNLRHTCKRIMDMVSNQHPWFGMEQEYTLMGTDGHPFGWPSNGFPGPQGPYYCGVGADRAYGRDIVEAHYRACLYAGVKIAGTNAEVMPAQWEFQIGPCEGISMGDHLWVARFILHRVCEDFGVIATFDPKPIPGNWNGAGCHTNFSTKAMREENGLKYIEEAIEKLSKRHQYHIRAYDPKGGLDNARRLTGFHETSNINDFSAGVANRSASIRIPRTVGQEKKGYFEDRRPSANCDPFSVTEALIRTCLLNETGDEPFQYKNTSGSGEGRGSLLTCGDVEENPGPMVSKGEELFTGVVPILVELDGDVNGHKFSVSGEGEGDATYGKLTLKFICTTGKLPVPWPTLVTTLTYGVQCFSRYPDHMKQHDFFKSAMPEGYVQERTIFFKDDGNYKTRAEVKFEGDTLVNRIELKGIDFKEDGNILGHKLEYNYNSHNVYIMADKQKNGIKVNFKIRHNIEDGSVQLADHYQQNTPIGDGPVLLPDNHYLSTQSALSKDPNEKRDHMVLLEFVTAAGITLGMDELYK

SEQ ID NO: 23118 - protein, 871 aa, Artificial Sequence
  Synthetic Polypeptide
MALPVTALLLPLALLLHAARPACEVQLVESGGGVVQPGRSLRLSCAASGFSFSGYGMHWVRQAPGKGLEWVAYISYDGSNKYYADSVKGRFTISRDNSKNTLYLQMNSLRAEDTAVYYCAKDPAWGLRLGESSSYDFDYWGQGTMVTVSSGTTRMDPDLEIEAAFLERENTALETRVAELRQRVQRLRNRVSQYRTRYGPLGGGKLERAKRSGSGATNFSLLKQAGDVEENPGPEFMTTSASSHLNKGIKQVYMSLPQGEKVQAMYIWIDGTGEGLRCKTRTLDSEPKCVEELPEWNFDGSSTLQSEGSNSDMYLVPAAMFRDPFRKDPNKLVLCEVFKYNRRPAETNLRHTCKRIMDMVSNQHPWFGMEQEYTLMGTDGHPFGWPSNGFPGPQGPYYCGVGADRAYGRDIVEAHYRACLYAGVKIAGTNAEVMPAQWEFQIGPCEGISMGDHLWVARFILHRVCEDFGVIATFDPKPIPGNWNGAGCHTNFSTKAMREENGLKYIEEAIEKLSKRHQYHIRAYDPKGGLDNARRLTGFHETSNINDFSAGVANRSASIRIPRTVGQEKKGYFEDRRPSANCDPFSVTEALIRTCLLNETGDEPFQYKNTSGSGEGRGSLLTCGDVEENPGPMVSKGEELFTGVVPILVELDGDVNGHKFSVSGEGEGDATYGKLTLKFICTTGKLPVPWPTLVTTLTYGVQCFSRYPDHMKQHDFFKSAMPEGYVQERTIFFKDDGNYKTRAEVKFEGDTLVNRIELKGIDFKEDGNILGHKLEYNYNSHNVYIMADKQKNGIKVNFKIRHNIEDGSVQLADHYQQNTPIGDGPVLLPDNHYLSTQSALSKDPNEKRDHMVLLEFVTAAGITLGMDELYK

SEQ ID NO: 23119 - protein, 858 aa, Artificial Sequence
  Synthetic Polypeptide
MALPVTALLLPLALLLHAARPQVQLVESGGGLVQPGGSLRLSCAASGFTFTNHAMSWVRQAPGKGLELVSSISGNGRTTYYADSVKGRFTISRDISKNTLDLQMNSLRAEDTAVYYCAKDGGETLVDSRGQGTLVTVSSTRMDPDLEIEAAFLERENTALETRVAELRQRVQRLRNRVSQYRTRYGPLGGGKLERAKRSGSGATNFSLLKQAGDVEENPGPEFMTTSASSHLNKGIKQVYMSLPQGEKVQAMYIWIDGTGEGLRCKTRTLDSEPKCVEELPEWNFDGSSTLQSEGSNSDMYLVPAAMFRDPFRKDPNKLVLCEVFKYNRRPAETNLRHTCKRIMDMVSNQHPWFGMEQEYTLMGTDGHPFGWPSNGFPGPQGPYYCGVGADRAYGRDIVEAHYRACLYAGVKIAGTNAEVMPAQWEFQIGPCEGISMGDHLWVARFILHRVCEDFGVIATFDPKPIPGNWNGAGCHTNFSTKAMREENGLKYIEEAIEKLSKRHQYHIRAYDPKGGLDNARRLTGFHETSNINDFSAGVANRSASIRIPRTVGQEKKGYFEDRRPSANCDPFSVTEALIRTCLLNETGDEPFQYKNTSGSGEGRGSLLTCGDVEENPGPMVSKGEELFTGVVPILVELDGDVNGHKFSVSGEGEGDATYGKLTLKFICTTGKLPVPWPTLVTTLTYGVQCFSRYPDHMKQHDFFKSAMPEGYVQERTIFFKDDGNYKTRAEVKFEGDTLVNRIELKGIDFKEDGNILGHKLEYNYNSHNVYIMADKQKNGIKVNFKIRHNIEDGSVQLADHYQQNTPIGDGPVLLPDNHYLSTQSALSKDPNEKRDHMVLLEFVTAAGITLGMDELYK

SEQ ID NO: 23120 - protein, 934 aa, Artificial Sequence
  Synthetic Polypeptide
MALPVTALLLPLALLLHAARPACDEGGGGSMGSWSEFWVRLGAIRERLDALGGSEAELAAFEKEIAAFESELQAYKGKGNPEVEKLRYTAATIRRFLQAYRHNGTGGGGSGGGGSGGGGSGLEKCFQTENPLECQDKGEEELQKYIQESQALAKRSCGLFQKLGEYYLQNAFLVAYTKKAPQLTSSELMAITRKMAATAATCCQLSEDKLLACGEGAADIIIGHLCIRHEMTPVNPGVGQCCTSSYANRRPCFSSLVVDETYVPPAFSDDKFIFHKDLCQAQGVALQTMKQEFLINLVKQKPQITEEQLEAVIADFSGLLEKCCQGQEQEVCFAEEGQKLISKTRAALGVGGGGSGGGGSGGGGSGPMGSWDEFGRRLYAIEWRLYALGGSEAELAAFEKEIAAFESELQAYKGKGNPEVEKLREIAAVIRSNLQAYRHNGSGGGGSGGGGSGGGGSHHHHHHHHHHTRGGSGVFTLEDFVGDWRQTAGYNLDQVLEQGGVSSLFQNLGVSVTPIQRIVLSGENGLKIDIHVIIPYEGLSGDQMGQIEKIFKVVYPVDDHHFKVILHYGTLVIDGVTPNMIDYFGRPYEGIAVFDGKKITVTGTLWNGNKIIDERLINPDGSLLFRVTINGVTGWRLCERILALEGGSWSHPQFEKDYKDDDDKGSDYKDDDDKGSDYKDDDDKGSDYKDDDDKAWSHPQFEKHHHHHHHHTSGSGEGRGSLLTCGDVEENPGPHMTEYKPTVRLATRDDVPRAVRTLAAAFADYPATRHTVDPDRHIERVTELQELFLTRVGLDIGKVWVADDGAAVAVWTTPESVEAGAVFAEIGPRMAELSGSRLAAQQQMEGLLAPHRPKEPAWFLATVGVSPDHQGKGLGSAVVLPGVEAAERAGVPAFLETSAPRNLPFYERLGFTVTADVEVPEGPRTWCMTRKPGA

SEQ ID NO: 23121 - protein, 9 aa, Artificial Sequence
  Synthetic Polypeptide
GGGGGGGGG

SEQ ID NO: 23122 - protein, 1113 aa, Artificial Sequence
  Synthetic Polypeptide
MALPVTALLLPLALLLHAARPACEWVKFAKPCREGEDNSKRNPIAKITSDYQATQKITYRISGVGIDQPPFGIFVVDKNTGDINITAIVDREETPSFLITCRALNAQGLDVEKPLILTVKILDINDNPPVFSQQIFMGEIEENSASNSLVMILNATDADEPNHLNSKIAFKIVSQEPAGTPMFLLSRNTGEVRTLTNSLDREQASSYRLVVSGADKDGEGLSTQCECNIKVKDVNDNFPMFRDSLEGQPKANPTVTLFPPSSEELQANKATLVCLISDFYPGAVTVAWKADGSPVKAGVETTKPSKQSNNKYAASSYLSLTPEQWKSHRSYSCQVTHEGSTVEKTVAPTECSGRADCGFTSESYQQGVLSATILYEILLGKATLYAVLVSALVLMAMVKRKDSRGRAKRSGSGATNFSLLKQAGDVEENPGPTSATMDWIWRILFLVGAATGAHSGPQVQLQESGGGLAQAGGSLRLSCAASGRTFSMGWFRQAPGKEREFVAAITYSGGSPYYASSVRGRFTISRDNAKNTVYLQMNSLKPEDTAVYYCAANPTYGSDWNAENWGQGTQVTVSSGSGGGGSGGGGSGGGGSFEQVQLQQPGAELVKPGASVKMSCKASGYAFSSYWINWMKQKPGQGLEWIGQIYPGDGDTNYNGKFKGRATLTADTSSSTAYMQLSSLTSEDSAVYFCARSITTVVGCAMDYWGQGTSVTVSSTRASTKGPSVFPLAPSSKSTSGGTAALGCLVKDYFPEPVTVSWNSGALTSGVHTFPAVLQSSGLYSLSSVVTVPSSSLGTQTYICNVNHKPSNTKVDKRVEPKSCIPEDTFFPSPESSCDVKLVEKSFETDTNLNFQNLSVIGFRILLLKVAGFNLLMTLRLWSSRAKRSGSGVKQTLNFDLLKLAGDVESNPGPSRGHMTEYKPTVRLATRDDVPRAVRTLAAAFADYPATRHTVDPDRHIERVTELQELFLTRVGLDIGKVWVADDGAAVAVWTTPESVEAGAVFAEIGPRMAELSGSRLAAQQQMEGLLAPHRPKEPAWFLATVGVSPDHQGKGLGSAVVLPGVEAAERAGVPAFLETSAPRNLPFYERLGFTVTADVEVPEGPRTWCMTRKPGA

SEQ ID NO: 23123 - protein, 1342 aa, Artificial Sequence
  Synthetic Polypeptide
MALPVTALLLPLALLLHAARPACEWVKFAKPCREGEDNSKRNPIAKITSDYQATQKITYRISGVGIDQPPFGIFVVDKNTGDINITAIVDREETPSFLITCRALNAQGLDVEKPLILTVKILDINDNPPVFSQQIFMGEIEENSASNSLVMILNATDADEPNHLNSKIAFKIVSQEPAGTPMFLLSRNTGEVRTLTNSLDREQASSYRLVVSGADKDGEGLSTQCECNIKVKDVNDNFPMFRDSQYSARIEENILSSELLRFQVTDLDEEYTDNWLAVYFFTSGNEGNWFEIQTDPRTNEGILKVVKALDYEQLQSVKLSIAVKNKAEFHQSVISRYRVQSTPVTIQVINVREGIAFRPASKTFTVQKGISSKKLVDYILGTYQAIDEDTNKAASNVKYVMGRNDGGYLMIDSKTAEIKFVKNMNRDSTFIVNKTITAEVLAIDEYTGKTSTGTVYVRVPDFNDNCPTAVLEKLEGQPKANPTVTLFPPSSEELQANKATLVCLISDFYPGAVTVAWKADGSPVKAGVETTKPSKQSNNKYAASSYLSLTPEQWKSHRSYSCQVTHEGSTVEKTVAPTECSGRADCGFTSESYQQGVLSATILYEILLGKATLYAVLVSALVLMAMVKRKDSRGRAKRSGSGATNFSLLKQAGDVEENPGPTSATMDWIWRILFLVGAATGAHSGPQVQLQESGGGLAQAGGSLRLSCAASGRTFSMGWFRQAPGKEREFVAAITYSGGSPYYASSVRGRFTISRDNAKNTVYLQMNSLKPEDTAVYYCAANPTYGSDWNAENWGQGTQVTVSSGSGGGGSGGGGSGGGGSFEQVQLQQPGAELVKPGASVKMSCKASGYAFSSYWINWMKQKPGQGLEWIGQIYPGDGDTNYNGKFKGRATLTADTSSSTAYMQLSSLTSEDSAVYFCARSITTVVGCAMDYWGQGTSVTVSSTRASTKGPSVFPLAPSSKSTSGGTAALGCLVKDYFPEPVTVSWNSGALTSGVHTFPAVLQSSGLYSLSSVVTVPSSSLGTQTYICNVNHKPSNTKVDKRVEPKSCIPEDTFFPSPESSCDVKLVEKSFETDTNLNFQNLSVIGFRILLLKVAGFNLLMTLRLWSSRAKRSGSGVKQTLNFDLLKLAGDVESNPGPSRGHMTEYKPTVRLATRDDVPRAVRTLAAAFADYPATRHTVDPDRHIERVTELQELFLTRVGLDIGKVWVADDGAAVAVWTTPESVEAGAVFAEIGPRMAELSGSRLAAQQQMEGLLAPHRPKEPAWFLATVGVSPDHQGKGLGSAVVLPGVEAAERAGVPAFLETSAPRNLPFYERLGFTVTADVEVPEGPRTWCMTRKPGA

SEQ ID NO: 23124 - protein, 1223 aa, Artificial Sequence
  Synthetic Polypeptide
MALPVTALLLPLALLLHAARPACEWVKFAKPCREGEDNSKRNPIAKITSDYQATQKITYRISGVGIDQPPFGIFVVDKNTGDINITAIVDREETPSFLITCRALNAQGLDVEKPLILTVKILDINDNPPVFSQQIFMGEIEENSASNSLVMILNATDADEPNHLNSKIAFKIVSQEPAGTPMFLLSRNTGEVRTLTNSLDREQASSYRLVVSGADKDGEGLSTQCECNIKVKDVNDNFPMFRDSLEGQPKANPTVTLFPPSSEELQANKATLVCLISDFYPGAVTVAWKADGSPVKAGVETTKPSKQSNNKYAASSYLSLTPEQWKSHRSYSCQVTHEGSTVEKTVAPTECSGRADCGFTSESYQQGVLSATILYEILLGKATLYAVLVSALVLMAMVKRKDSRGRAKRSGSGATNFSLLKQAGDVEENPGPTSATMDWIWRILFLVGAATGAHSGPQVQLQESGGGLAQAGGSLRLSCAASGRTFSMGWFRQAPGKEREFVAAITYSGGSPYYASSVRGRFTISRDNAKNTVYLQMNSLKPEDTAVYYCAANPTYGSDWNAENWGQGTQVTVSSGSGGGGSGGGGSGGGGSFEDSQYSARIEENILSSELLRFQVTDLDEEYTDNWLAVYFFTSGNEGNWFEIQTDPRTNEGILKVVKALDYEQLQSVKLSIAVKNKAEFHQSVISRYRVQSTPVTIQVINVREGIAFRPASKTFTVQKGISSKKLVDYILGTYQAIDEDTNKAASNVKYVMGRNDGGYLMIDSKTAEIKFVKNMNRDSTFIVNKTITAEVLAIDEYTGKTSTGTVYVRVPDFNDNCPTAVLEKTRASTKGPSVFPLAPSSKSTSGGTAALGCLVKDYFPEPVTVSWNSGALTSGVHTFPAVLQSSGLYSLSSVVTVPSSSLGTQTYICNVNHKPSNTKVDKRVEPKSCIPEDTFFPSPESSCDVKLVEKSFETDTNLNFQNLSVIGFRILLLKVAGFNLLMTLRLWSSRAKRSGSGVKQTLNFDLLKLAGDVESNPGPSRGHMTEYKPTVRLATRDDVPRAVRTLAAAFADYPATRHTVDPDRHIERVTELQELFLTRVGLDIGKVWVADDGAAVAVWTTPESVEAGAVFAEIGPRMAELSGSRLAAQQQMEGLLAPHRPKEPAWFLATVGVSPDHQGKGLGSAVVLPGVEAAERAGVPAFLETSAPRNLPFYERLGFTVTADVEVPEGPRTWCMTRKPGA

SEQ ID NO: 23125 - protein, 1086 aa, Artificial Sequence
  Synthetic Polypeptide
MALPVTALLLPLALLLHAARPACEWVKFAKPCREGEDNSKRNPIAKITSDYQATQKITYRISGVGIDQPPFGIFVVDKNTGDINITAIVDREETPSFLITCRALNAQGLDVEKPLILTVKILDINDNPPVFSQQIFMGEIEENSASNSLVMILNATDADEPNHLNSKIAFKIVSQEPAGTPMFLLSRNTGEVRTLTNSLDREQASSYRLVVSGADKDGEGLSTQCECNIKVKDVNDNFPMFRDSLEGQPKANPTVTLFPPSSEELQANKATLVCLISDFYPGAVTVAWKADGSPVKAGVETTKPSKQSNNKYAASSYLSLTPEQWKSHRSYSCQVTHEGSTVEKTVAPTECSGRADCGFTSESYQQGVLSATILYEILLGKATLYAVLVSALVLMAMVKRKDSRGRAKRSGSGATNFSLLKQAGDVEENPGPTSATMDWIWRILFLVGAATGAHSFEDSQYSARIEENILSSELLRFQVTDLDEEYTDNWLAVYFFTSGNEGNWFEIQTDPRTNEGILKVVKALDYEQLQSVKLSIAVKNKAEFHQSVISRYRVQSTPVTIQVINVREGIAFRPASKTFTVQKGISSKKLVDYILGTYQAIDEDTNKAASNVKYVMGRNDGGYLMIDSKTAEIKFVKNMNRDSTFIVNKTITAEVLAIDEYTGKTSTGTVYVRVPDFNDNCPTAVLEKTRASTKGPSVFPLAPSSKSTSGGTAALGCLVKDYFPEPVTVSWNSGALTSGVHTFPAVLQSSGLYSLSSVVTVPSSSLGTQTYICNVNHKPSNTKVDKRVEPKSCIPEDTFFPSPESSCDVKLVEKSFETDTNLNFQNLSVIGFRILLLKVAGFNLLMTLRLWSSRAKRSGSGVKQTLNFDLLKLAGDVESNPGPSRGHMTEYKPTVRLATRDDVPRAVRTLAAAFADYPATRHTVDPDRHIERVTELQELFLTRVGLDIGKVWVADDGAAVAVWTTPESVEAGAVFAEIGPRMAELSGSRLAAQQQMEGLLAPHRPKEPAWFLATVGVSPDHQGKGLGSAVVLPGVEAAERAGVPAFLETSAPRNLPFYERLGFTVTADVEVPEGPRTWCMTRKPGA

SEQ ID NO: 23126 - protein, 1349 aa, Artificial Sequence
  Synthetic Polypeptide
MALPVTALLLPLALLLHAARPACEWVKFAKPCREGEDNSKRNPIAKITSDYQATQKITYRISGVGIDQPPFGIFVVDKNTGDINITAIVDREETPSFLITCRALNAQGLDVEKPLILTVKILDINDNPPVFSQQIFMGEIEENSASNSLVMILNATDADEPNHLNSKIAFKIVSQEPAGTPMFLLSRNTGEVRTLTNSLDREQASSYRLVVSGADKDGEGLSTQCECNIKVKDVNDNFPMFRDSGTGGGGSGGGGSGGGGSEFDIQMTQSPSSLSASVGDRVTITCKASDHINNWLAWYQQKPGQAPKLLIYGATTLETGVPSRFSGSGSGTDYTLTISSLQPEDFATYYCQQSWNTPWTFGQGTKLEIKRLEDLKNVFPPEVAVFEPSKAEIAHTQKATLVCLATGFYPDHVELSWWVNGKEVHSGVCTDPQPLKEQPALNDSRYCLSSRLRVSATFWQNPRNHFRCQVQFYGLSENDEWTQDRAKPVTQIVSAEAWGRADCGITSASYHQGVLSATILYEILLGKATLYAVLVSALVLMAMVKRKDSRGRAKRSGSGATNFSLLKQAGDVEENPGPTSATMDWIWRILFLVGAATGAHSGPDSQYSARIEENILSSELLRFQVTDLDEEYTDNWLAVYFFTSGNEGNWFEIQTDPRTNEGILKVVKALDYEQLQSVKLSIAVKNKAEFHQSVISRYRVQSTPVTIQVINVREGIAFRPASKTFTVQKGISSKKLVDYILGTYQAIDEDTNKAASNVKYVMGRNDGGYLMIDSKTAEIKFVKNMNRDSTFIVNKTITAEVLAIDEYTGKTSTGTVYVRVPDFNDNCPTAVLEKGSGGGGSGGGGSGGGGSFEQVQLQQPGAELVKPGASVKMSCKASGYAFSSYWINWMKQKPGQGLEWIGQIYPGDGDTNYNGKFKGRATLTADTSSSTAYMQLSSLTSEDSAVYFCARSITTVVGCAMDYWGQGTSVTVSSTRIQNPDPAVYQLRDSKSSDKSVCLFTDFDSQTNVSQSKDSDVYITDKCVLDMRSMDFKSNSAVAWSNKSDFACANAFNNSIIPEDTFFPSSDVPCDVKLVEKSFETDTNLNFQNLSVIGFRILLLKVAGFNLLMTLRLWSSRAKRSGSGVKQTLNFDLLKLAGDVESNPGPSRGHMTEYKPTVRLATRDDVPRAVRTLAAAFADYPATRHTVDPDRHIERVTELQELFLTRVGLDIGKVWVADDGAAVAVWTTPESVEAGAVFAEIGPRMAELSGSRLAAQQQMEGLLAPHRPKEPAWFLATVGVSPDHQGKGLGSAVVLPGVEAAERAGVPAFLETSAPRNLPFYERLGFTVTADVEVPEGPRTWCMTRKPGA

SEQ ID NO: 23127 - protein, 1350 aa, Artificial Sequence
  Synthetic Polypeptide
MALPVTALLLPLALLLHAARPACEWVKFAKPCREGEDNSKRNPIAKITSDYQATQKITYRISGVGIDQPPFGIFVVDKNTGDINITAIVDREETPSFLITCRALNAQGLDVEKPLILTVKILDINDNPPVFSQQIFMGEIEENSASNSLVMILNATDADEPNHLNSKIAFKIVSQEPAGTPMFLLSRNTGEVRTLTNSLDREQASSYRLVVSGADKDGEGLSTQCECNIKVKDVNDNFPMFRDSGTGGGGSGGGGSGGGGSEFDIQMTQSPSSLSASVGDRVTITCKASDHINNWLAWYQQKPGQAPKLLIYGATTLETGVPSRFSGSGSGTDYTLTISSLQPEDFATYYCQQSWNTPWTFGQGTKLEIKRLEADVSPKPTIFLPSIAETKLQKAGTYLCLLEKFFPDVIKIHWQEKKSNTILGSQEGNTMKTNDTYMKFSWLTVPEKSLDKEHRCIVRHENNKNGVDQEIIFPPIKTDVITMDPKDNCSKDANDTLLLQLTNTSAYYMYLLLLLKSVVYFAIITCCLLRRTAFCCNGEKSRAKRSGSGATNFSLLKQAGDVEENPGPTSATMDWIWRILFLVGAATGAHSGPDSQYSARIEENILSSELLRFQVTDLDEEYTDNWLAVYFFTSGNEGNWFEIQTDPRTNEGILKVVKALDYEQLQSVKLSIAVKNKAEFHQSVISRYRVQSTPVTIQVINVREGIAFRPASKTFTVQKGISSKKLVDYILGTYQAIDEDTNKAASNVKYVMGRNDGGYLMIDSKTAEIKFVKNMNRDSTFIVNKTITAEVLAIDEYTGKTSTGTVYVRVPDFNDNCPTAVLEKGSGGGGSGGGGSGGGGSFEQVQLQQPGAELVKPGASVKMSCKASGYAFSSYWINWMKQKPGQGLEWIGQIYPGDGDTNYNGKFKGRATLTADTSSSTAYMQLSSLTSEDSAVYFCARSITTVVGCAMDYWGQGTSVTVSSTRPHTKPSVFVMKNGTNVACLVKEFYPKDIRINLVSSKKITEFDPAIVISPSGKYNAVKLGKYEDSNSVTCSVQHDNKTVHSTDFEVKTDSTDHVKPKETENTKQPSKSCHKPKAIVHTEKVNMMSLTVLGLRMLFAKTVAVNFLLTAKLFFLRAKRSGSGVKQTLNFDLLKLAGDVESNPGPSRGHMTEYKPTVRLATRDDVPRAVRTLAAAFADYPATRHTVDPDRHIERVTELQELFLTRVGLDIGKVWVADDGAAVAVWTTPESVEAGAVFAEIGPRMAELSGSRLAAQQQMEGLLAPHRPKEPAWFLATVGVSPDHQGKGLGSAVVLPGVEAAERAGVPAFLETSAPRNLPFYERLGFTVTADVEVPEGPRTWCMTRKPGA

SEQ ID NO: 23128-23135 - skipped (8 entries)

SEQ ID NO: 23136 - protein, 113 aa, Artificial Sequence; identical to SEQ ID NO: 10967
  Synthetic Polypeptide

SEQ ID NO: 23137 - protein, 113 aa, Artificial Sequence; identical to SEQ ID NO: 10883
  Synthetic Polypeptide

SEQ ID NO: 23138 - protein, 113 aa, Artificial Sequence; identical to SEQ ID NO: 10967
  Synthetic Polypeptide

SEQ ID NO: 23139 - protein, 108 aa, Artificial Sequence; identical to SEQ ID NO: 10884
  Synthetic Polypeptide

SEQ ID NO: 23140 - protein, 108 aa, Artificial Sequence; identical to SEQ ID NO: 10971
  Synthetic Polypeptide

SEQ ID NO: 23141 - protein, 108 aa, Artificial Sequence; identical to SEQ ID NO: 10972
  Synthetic Polypeptide

SEQ ID NO: 23142 - protein, 108 aa, Artificial Sequence; identical to SEQ ID NO: 10920
  Synthetic Polypeptide

SEQ ID NO: 23143 - protein, 108 aa, Artificial Sequence; identical to SEQ ID NO: 10932
  Synthetic Polypeptide

SEQ ID NO: 23144 - protein, 108 aa, Artificial Sequence; identical to SEQ ID NO: 10933
  Synthetic Polypeptide

SEQ ID NO: 23145 - protein, 108 aa, Artificial Sequence; identical to SEQ ID NO: 10934
  Synthetic Polypeptide

SEQ ID NO: 23146 - protein, 108 aa, Artificial Sequence; identical to SEQ ID NO: 10935
  Synthetic Polypeptide

SEQ ID NO: 23147 - protein, 108 aa, Artificial Sequence; identical to SEQ ID NO: 10771
  Synthetic Polypeptide

SEQ ID NO: 23148 - protein, 116 aa, Artificial Sequence; identical to SEQ ID NO: 11209
  Synthetic Polypeptide

SEQ ID NO: 23149 - protein, 115 aa, Artificial Sequence; identical to SEQ ID NO: 11210
  Synthetic Polypeptide

SEQ ID NO: 23150 - protein, 115 aa, Artificial Sequence; identical to SEQ ID NO: 11125
  Synthetic Polypeptide

SEQ ID NO: 23151 - protein, 117 aa, Artificial Sequence; identical to SEQ ID NO: 11212
  Synthetic Polypeptide

SEQ ID NO: 23152 - protein, 117 aa, Artificial Sequence; identical to SEQ ID NO: 11126
  Synthetic Polypeptide

SEQ ID NO: 23153 - protein, 117 aa, Artificial Sequence; identical to SEQ ID NO: 11126
  Synthetic Polypeptide

SEQ ID NO: 23154 - protein, 122 aa, Artificial Sequence; identical to SEQ ID NO: 11167
  Synthetic Polypeptide

SEQ ID NO: 23155 - protein, 122 aa, Artificial Sequence; identical to SEQ ID NO: 11168
  Synthetic Polypeptide

SEQ ID NO: 23156 - protein, 122 aa, Artificial Sequence; identical to SEQ ID NO: 11169
  Synthetic Polypeptide

SEQ ID NO: 23157 - protein, 122 aa, Artificial Sequence; identical to SEQ ID NO: 11170
  Synthetic Polypeptide

SEQ ID NO: 23158 - protein, 122 aa, Artificial Sequence; identical to SEQ ID NO: 11171
  Synthetic Polypeptide

SEQ ID NO: 23159 - protein, 122 aa, Artificial Sequence; identical to SEQ ID NO: 11172
  Synthetic Polypeptide

SEQ ID NO: 23160 - protein, 122 aa, Artificial Sequence; identical to SEQ ID NO: 11173
  Synthetic Polypeptide

SEQ ID NO: 23161 - protein, 119 aa, Artificial Sequence; identical to SEQ ID NO: 22345
  Synthetic Polypeptide

SEQ ID NO: 23162 - protein, 118 aa, Artificial Sequence; identical to SEQ ID NO: 11531
  Synthetic Polypeptide

SEQ ID NO: 23163 - protein, 120 aa, Artificial Sequence; identical to SEQ ID NO: 11550
  Synthetic Polypeptide

SEQ ID NO: 23164 - protein, 120 aa, Artificial Sequence; identical to SEQ ID NO: 11551
  Synthetic Polypeptide

SEQ ID NO: 23165 - protein, 128 aa, Artificial Sequence; identical to SEQ ID NO: 11552
  Synthetic Polypeptide

SEQ ID NO: 23166 - protein, 128 aa, Artificial Sequence; identical to SEQ ID NO: 11553
  Synthetic Polypeptide

SEQ ID NO: 23167 - protein, 118 aa, Artificial Sequence
  Synthetic Polypeptide
EVQLVESGGGLVQAGGSLRLSCAASGRTFTMGWFRQAPGKEREFVAAISLSPTLAYYADSVKGRFTISRDNAKNTVVLQMNSLKPEDTALYYCAADRKSVMSIRPDYWGQGTQVTVSS

SEQ ID NO: 23168 - protein, 119 aa, Artificial Sequence
  Synthetic Polypeptide
QVKLEESGGGLVQPGESLRLSCSASGSIFKVFRVFAMSWYRQGPGKQRELVASISSGETTTYAESVKGRFTISRDNAKNTAYLQMDSLKPEDTAVYYCNADHTFTGDFWGQGTQVTVSS

SEQ ID NO: 23169 - protein, 119 aa, Artificial Sequence
  Synthetic Polypeptide
QVKLEESGGGLVQPGESLRLSCSASGSIFKVFRVFAMSWYRQGPGKQRELVAEISSGETTTYADSVKGRFTISRDNAKNTAYLQMDSLKPEDTAVYYCNADHTFTGDFWGQGTQVTVSS

SEQ ID NO: 23170 - protein, 115 aa, Artificial Sequence; identical to SEQ ID NO: 22368
  Synthetic Polypeptide

SEQ ID NO: 23171 - protein, 119 aa, Artificial Sequence; identical to SEQ ID NO: 22375
  Synthetic Polypeptide

SEQ ID NO: 23172 - protein, 119 aa, Artificial Sequence; identical to SEQ ID NO: 22376
  Synthetic Polypeptide

SEQ ID NO: 23173 - protein, 119 aa, Artificial Sequence; identical to SEQ ID NO: 22377
  Synthetic Polypeptide

SEQ ID NO: 23174 - protein, 118 aa, Artificial Sequence; identical to SEQ ID NO: 22378
  Synthetic Polypeptide

SEQ ID NO: 23175 - protein, 113 aa, Artificial Sequence; identical to SEQ ID NO: 22369
  Synthetic Polypeptide

SEQ ID NO: 23176 - protein, 113 aa, Artificial Sequence; identical to SEQ ID NO: 22370
  Synthetic Polypeptide

SEQ ID NO: 23177 - protein, 113 aa, Artificial Sequence; identical to SEQ ID NO: 22371
  Synthetic Polypeptide

SEQ ID NO: 23178 - protein, 127 aa, Artificial Sequence; identical to SEQ ID NO: 22372
  Synthetic Polypeptide

SEQ ID NO: 23179 - protein, 123 aa, Artificial Sequence; identical to SEQ ID NO: 22373
  Synthetic Polypeptide

SEQ ID NO: 23180 - protein, 126 aa, Artificial Sequence; identical to SEQ ID NO: 22374
  Synthetic Polypeptide

SEQ ID NO: 23181 - protein, 11 aa, Artificial Sequence
  Synthetic Polypeptide
QSLLYSSNQKN

SEQ ID NO: 23182 - protein, 11 aa, Artificial Sequence
  Synthetic Polypeptide
QSVLYSSNQKN

SEQ ID NO: 23183 - protein, 11 aa, Artificial Sequence
  Synthetic Polypeptide
QSLLYSSNQKN

SEQ ID NO: 23184 - protein, 11 aa, Artificial Sequence
  Synthetic Polypeptide
RASQDISNYLN

SEQ ID NO: 23185 - protein, 11 aa, Artificial Sequence
  Synthetic Polypeptide
RASQDISSYLN

SEQ ID NO: 23186 - protein, 11 aa, Artificial Sequence
  Synthetic Polypeptide
RASQDISNYLN

SEQ ID NO: 23187 - protein, 7 aa, Artificial Sequence
  Synthetic Polypeptide
NNIGSKS

SEQ ID NO: 23188 - protein, 7 aa, Artificial Sequence
  Synthetic Polypeptide
KNIGSKS

SEQ ID NO: 23189 - protein, 7 aa, Artificial Sequence
  Synthetic Polypeptide
NNLGSKS

SEQ ID NO: 23190 - protein, 7 aa, Artificial Sequence
  Synthetic Polypeptide
NNIGGKS

SEQ ID NO: 23191 - protein, 7 aa, Artificial Sequence
  Synthetic Polypeptide
NNIGSKT

SEQ ID NO: 23192 - protein, 6 aa, Artificial Sequence
  Synthetic Polypeptide
QDVGIA

SEQ ID NO: 23193 - protein, 8 aa, Artificial Sequence
  Synthetic Polypeptide
GYTFTSYW

SEQ ID NO: 23194 - protein, 8 aa, Artificial Sequence
  Synthetic Polypeptide
GFTFTSYW

SEQ ID NO: 23195 - protein, 8 aa, Artificial Sequence
  Synthetic Polypeptide
GYTFTSYW

SEQ ID NO: 23196 - protein, 8 aa, Artificial Sequence
  Synthetic Polypeptide
GYTFSDYF

SEQ ID NO: 23197 - protein, 8 aa, Artificial Sequence
  Synthetic Polypeptide
GFTFSDYF

SEQ ID NO: 23198 - protein, 8 aa, Artificial Sequence
  Synthetic Polypeptide
GFTFSDYF

SEQ ID NO: 23199 - protein, 10 aa, Artificial Sequence
  Synthetic Polypeptide
GGSISSSSYF

SEQ ID NO: 23200 - protein, 10 aa, Artificial Sequence
  Synthetic Polypeptide
GGSISSSSYI

SEQ ID NO: 23201 - protein, 10 aa, Artificial Sequence
  Synthetic Polypeptide
GGSISSGSYF

SEQ ID NO: 23202 - protein, 10 aa, Artificial Sequence
  Synthetic Polypeptide
GGSISSGSYF

SEQ ID NO: 23203 - protein, 10 aa, Artificial Sequence
  Synthetic Polypeptide
GGSISSGSYF

SEQ ID NO: 23204 - protein, 10 aa, Artificial Sequence
  Synthetic Polypeptide
GGSISSGSYF

SEQ ID NO: 23205 - protein, 10 aa, Artificial Sequence
  Synthetic Polypeptide
GGSISSGSYF

SEQ ID NO: 23206 - protein, 8 aa, Artificial Sequence
  Synthetic Polypeptide
GFDFSRYW

SEQ ID NO: 23207 - protein, 4 aa, Artificial Sequence
  Synthetic Polypeptide
FSMG

SEQ ID NO: 23208 - protein, 5 aa, Artificial Sequence
  Synthetic Polypeptide
SLFMG

SEQ ID NO: 23209 - protein, 5 aa, Artificial Sequence
  Synthetic Polypeptide
SLFMG

SEQ ID NO: 23210 - protein, 10 aa, Artificial Sequence
  Synthetic Polypeptide
GFASDDYIIG

SEQ ID NO: 23211 - protein, 10 aa, Artificial Sequence
  Synthetic Polypeptide
GFASDYYIIG

SEQ ID NO: 23212 - protein, 4 aa, Artificial Sequence
  Synthetic Polypeptide
FTMG

SEQ ID NO: 23213 - protein, 8 aa, Artificial Sequence
  Synthetic Polypeptide
VFRVFAMS

SEQ ID NO: 23214 - protein, 8 aa, Artificial Sequence
  Synthetic Polypeptide
VFRVFAMS

SEQ ID NO: 23215 - protein, 8 aa, Artificial Sequence
  Synthetic Polypeptide
GSVFSGNV

SEQ ID NO: 23216 - protein, 7 aa, Artificial Sequence
  Synthetic Polypeptide
GSIFSIH

SEQ ID NO: 23217 - protein, 7 aa, Artificial Sequence
  Synthetic Polypeptide
GSIASIH

SEQ ID NO: 23218 - protein, 7 aa, Artificial Sequence
  Synthetic Polypeptide
GSIASIH

SEQ ID NO: 23219 - protein, 5 aa, Artificial Sequence
  Synthetic Polypeptide
GGSID

SEQ ID NO: 23220 - protein, 8 aa, Artificial Sequence
  Synthetic Polypeptide
GFSFSGYA

SEQ ID NO: 23221 - protein, 8 aa, Artificial Sequence
  Synthetic Polypeptide
GFSFSSYA

SEQ ID NO: 23222 - protein, 8 aa, Artificial Sequence
  Synthetic Polypeptide
GFSFSGYA

SEQ ID NO: 23223 - protein, 8 aa, Artificial Sequence
  Synthetic Polypeptide
GFSFSGYG

SEQ ID NO: 23224 - protein, 8 aa, Artificial Sequence
  Synthetic Polypeptide
GFPLISYG

SEQ ID NO: 23225 - protein, 7 aa, Artificial Sequence
  Synthetic Polypeptide
GGSFSAY

SEQ ID NO: 23226 - protein, 5 aa, Artificial Sequence
  Synthetic Polypeptide
WASTR

SEQ ID NO: 23227 - protein, 5 aa, Artificial Sequence
  Synthetic Polypeptide
WASTR

SEQ ID NO: 23228 - protein, 5 aa, Artificial Sequence
  Synthetic Polypeptide
WASTR

SEQ ID NO: 23229 - protein, 7 aa, Artificial Sequence
  Synthetic Polypeptide
YTSRLHS

SEQ ID NO: 23230 - protein, 7 aa, Artificial Sequence
  Synthetic Polypeptide
YTSRLHS

SEQ ID NO: 23231 - protein, 7 aa, Artificial Sequence
  Synthetic Polypeptide
YTSRLHS

SEQ ID NO: 23232 - protein, 4 aa, Artificial Sequence
  Synthetic Polypeptide
YDDS

SEQ ID NO: 23233 - protein, 4 aa, Artificial Sequence
  Synthetic Polypeptide
YDDS

SEQ ID NO: 23234 - protein, 4 aa, Artificial Sequence
  Synthetic Polypeptide
YDDS

SEQ ID NO: 23235 - protein, 4 aa, Artificial Sequence
  Synthetic Polypeptide
YDDS

SEQ ID NO: 23236 - protein, 4 aa, Artificial Sequence
  Synthetic Polypeptide
YDDS

SEQ ID NO: 23237 - protein, 4 aa, Artificial Sequence
  Synthetic Polypeptide
WAST

SEQ ID NO: 23238 - protein, 8 aa, Artificial Sequence
  Synthetic Polypeptide
IRPSTGYT

SEQ ID NO: 23239 - protein, 8 aa, Artificial Sequence
  Synthetic Polypeptide
IRPSTGYT

SEQ ID NO: 23240 - protein, 8 aa, Artificial Sequence
  Synthetic Polypeptide
IRPSTGYT

SEQ ID NO: 23241 - protein, 8 aa, Artificial Sequence
  Synthetic Polypeptide
ISNGGTYT

SEQ ID NO: 23242 - protein, 8 aa, Artificial Sequence
  Synthetic Polypeptide
ISNGGTYT

SEQ ID NO: 23243 - protein, 8 aa, Artificial Sequence
  Synthetic Polypeptide
ISNGGTYT

SEQ ID NO: 23244 - protein, 12 aa, Artificial Sequence
  Synthetic Polypeptide
IYYSGITYYNPS

SEQ ID NO: 23245 - protein, 12 aa, Artificial Sequence
  Synthetic Polypeptide
IYYSGITYYNPS

SEQ ID NO: 23246 - protein, 12 aa, Artificial Sequence
  Synthetic Polypeptide
IYYSGITYYNPS

SEQ ID NO: 23247 - protein, 12 aa, Artificial Sequence
  Synthetic Polypeptide
IYYSGSTYYNPS

SEQ ID NO: 23248 - protein, 12 aa, Artificial Sequence
  Synthetic Polypeptide
IYYSGISYYNPS

SEQ ID NO: 23249 - protein, 12 aa, Artificial Sequence
  Synthetic Polypeptide
IYYSGITYYNPG

SEQ ID NO: 23250 - protein, 12 aa, Artificial Sequence
  Synthetic Polypeptide
IYYSGITYYNPT

SEQ ID NO: 23251 - protein, 8 aa, Artificial Sequence
  Synthetic Polypeptide
INPDSSTI

SEQ ID NO: 23252 - protein, 17 aa, Artificial Sequence
  Synthetic Polypeptide
AITYSGGSPYYASSVRG

SEQ ID NO: 23253 - protein, 17 aa, Artificial Sequence
  Synthetic Polypeptide
AISRYSLYTYYADSVKG

SEQ ID NO: 23254 - protein, 17 aa, Artificial Sequence
  Synthetic Polypeptide
AISRYSLYTYYADSVKG

SEQ ID NO: 23255 - protein, 18 aa, Artificial Sequence
  Synthetic Polypeptide
CISSKYANTVYTDSVKGR

SEQ ID NO: 23256 - protein, 18 aa, Artificial Sequence
  Synthetic Polypeptide
CISSRYANTNYADSVKGR

SEQ ID NO: 23257 - protein, 7 aa, Artificial Sequence
  Synthetic Polypeptide
YYADSVK

SEQ ID NO: 23258 - protein, 16 aa, Artificial Sequence
  Synthetic Polypeptide
EISSGETTTYAESVKG

SEQ ID NO: 23259 - protein, 16 aa, Artificial Sequence
  Synthetic Polypeptide
EISSGETTTYADSVKG

SEQ ID NO: 23260 - protein, 7 aa, Artificial Sequence
  Synthetic Polypeptide
IASGGSI

SEQ ID NO: 23261 - protein, 9 aa, Artificial Sequence
  Synthetic Polypeptide
ITWSGGITY

SEQ ID NO: 23262 - protein, 9 aa, Artificial Sequence
  Synthetic Polypeptide
ITWSGGITY

SEQ ID NO: 23263 - protein, 9 aa, Artificial Sequence
  Synthetic Polypeptide
ITWSGGITY

SEQ ID NO: 23264 - protein, 7 aa, Artificial Sequence
  Synthetic Polypeptide
IYYSGAT

SEQ ID NO: 23265 - protein, 8 aa, Artificial Sequence
  Synthetic Polypeptide
IGENDGTT

SEQ ID NO: 23266 - protein, 8 aa, Artificial Sequence
  Synthetic Polypeptide
IGENDGTT

SEQ ID NO: 23267 - protein, 8 aa, Artificial Sequence
  Synthetic Polypeptide
IGENDGTT

SEQ ID NO: 23268 - protein, 8 aa, Artificial Sequence
  Synthetic Polypeptide
ISYDGSNK

SEQ ID NO: 23269 - protein, 8 aa, Artificial Sequence
  Synthetic Polypeptide
MTYDGSNR

SEQ ID NO: 23270 - protein, 8 aa, Artificial Sequence
  Synthetic Polypeptide
INHRGDTA

SEQ ID NO: 23271 - protein, 8 aa, Artificial Sequence
  Synthetic Polypeptide
HQYLSSYT

SEQ ID NO: 23272 - protein, 8 aa, Artificial Sequence
  Synthetic Polypeptide
HQYLSSYT

SEQ ID NO: 23273 - protein, 8 aa, Artificial Sequence
  Synthetic Polypeptide
HQYLSSYT

SEQ ID NO: 23274 - protein, 9 aa, Artificial Sequence
  Synthetic Polypeptide
QQGNTLPYT

SEQ ID NO: 23275 - protein, 9 aa, Artificial Sequence
  Synthetic Polypeptide
QQGNTLPYT

SEQ ID NO: 23276 - protein, 9 aa, Artificial Sequence
  Synthetic Polypeptide
QQGNTLPWT

SEQ ID NO: 23277 - protein, 11 aa, Artificial Sequence
  Synthetic Polypeptide
QVWDSSSDHVV

SEQ ID NO: 23278 - protein, 11 aa, Artificial Sequence
  Synthetic Polypeptide
QVWDSSSDHVV

SEQ ID NO: 23279 - protein, 11 aa, Artificial Sequence
  Synthetic Polypeptide
QVWDSSSDHVV

SEQ ID NO: 23280 - protein, 11 aa, Artificial Sequence
  Synthetic Polypeptide
QVWDSSSDHVV

SEQ ID NO: 23281 - protein, 11 aa, Artificial Sequence
  Synthetic Polypeptide
QVWDSSSDHVV

SEQ ID NO: 23282 - protein, 9 aa, Artificial Sequence
  Synthetic Polypeptide
QQYSSYPYT

SEQ ID NO: 23283 - protein, 7 aa, Artificial Sequence
  Synthetic Polypeptide
SRWLLDY

SEQ ID NO: 23284 - protein, 7 aa, Artificial Sequence
  Synthetic Polypeptide
SRWLLDY

SEQ ID NO: 23285 - protein, 7 aa, Artificial Sequence
  Synthetic Polypeptide
SRWLLDY

SEQ ID NO: 23286 - protein, 8 aa, Artificial Sequence
  Synthetic Polypeptide
FDGYIFDY

SEQ ID NO: 23287 - protein, 8 aa, Artificial Sequence
  Synthetic Polypeptide
FDGYIFDY

SEQ ID NO: 23288 - protein, 8 aa, Artificial Sequence
  Synthetic Polypeptide
FDGYIFDY

SEQ ID NO: 23289 - protein, 13 aa, Artificial Sequence
  Synthetic Polypeptide
ARHDGAVAGLFDY

SEQ ID NO: 23290 - protein, 13 aa, Artificial Sequence
  Synthetic Polypeptide
ARHDGAVAGLFDY

SEQ ID NO: 23291 - protein, 13 aa, Artificial Sequence
  Synthetic Polypeptide
ARHDGAMAGLFDY

SEQ ID NO: 23292 - protein, 13 aa, Artificial Sequence
  Synthetic Polypeptide
ARHDGAVAGLFDY

SEQ ID NO: 23293 - protein, 13 aa, Artificial Sequence
  Synthetic Polypeptide
ARHDGAVAGLFDY

SEQ ID NO: 23294 - protein, 13 aa, Artificial Sequence
  Synthetic Polypeptide
ARHDGAVAGLFDY

SEQ ID NO: 23295 - protein, 13 aa, Artificial Sequence
  Synthetic Polypeptide
ARHDGAVAGLFDY

SEQ ID NO: 23296 - protein, 12 aa, Artificial Sequence
  Synthetic Polypeptide
ARPDGNYWYFDV

SEQ ID NO: 23297 - protein, 12 aa, Artificial Sequence
  Synthetic Polypeptide
NPTYGSDWNAEN

SEQ ID NO: 23298 - protein, 11 aa, Artificial Sequence
  Synthetic Polypeptide
KLEYTSNDYDS

SEQ ID NO: 23299 - protein, 11 aa, Artificial Sequence
  Synthetic Polypeptide
KLEYTSNDYDS

SEQ ID NO: 23300 - protein, 20 aa, Artificial Sequence
  Synthetic Polypeptide
MDSRRVTCPEISTMHRNFDS

SEQ ID NO: 23301 - protein, 20 aa, Artificial Sequence
  Synthetic Polypeptide
ADTRRYTCPDIATMHRNFDS

SEQ ID NO: 23302 - protein, 13 aa, Artificial Sequence
  Synthetic Polypeptide
ADRKSVMSIRPDY

SEQ ID NO: 23303 - protein, 8 aa, Artificial Sequence
  Synthetic Polypeptide
DHTFTGDF

SEQ ID NO: 23304 - protein, 8 aa, Artificial Sequence
  Synthetic Polypeptide
DHTFTGDF

SEQ ID NO: 23305 - protein, 9 aa, Artificial Sequence
  Synthetic Polypeptide
NSHPPTLPY

SEQ ID NO: 23306 - protein, 9 aa, Artificial Sequence
  Synthetic Polypeptide
DRAESSWYD

SEQ ID NO: 23307 - protein, 11 aa, Artificial Sequence
  Synthetic Polypeptide
GDKHQSSWYDY

SEQ ID NO: 23308 - protein, 11 aa, Artificial Sequence
  Synthetic Polypeptide
GDKHQSSWYDY

SEQ ID NO: 23309 - protein, 6 aa, Artificial Sequence
  Synthetic Polypeptide
RDDSSN

SEQ ID NO: 23310 - protein, 7 aa, Artificial Sequence
  Synthetic Polypeptide
VKDGVHW

SEQ ID NO: 23311 - protein, 7 aa, Artificial Sequence
  Synthetic Polypeptide
VKDGIHW

SEQ ID NO: 23312 - protein, 7 aa, Artificial Sequence
  Synthetic Polypeptide
VKDGIHW

SEQ ID NO: 23313 - protein, 20 aa, Artificial Sequence
  Synthetic Polypeptide
AKDPAWGLRLGESSSYDFDY

SEQ ID NO: 23314 - protein, 15 aa, Artificial Sequence
  Synthetic Polypeptide
RDRIVGGRVPDSFDY

SEQ ID NO: 23315 - protein, 18 aa, Artificial Sequence
  Synthetic Polypeptide
RGYSYGWPPGYISDAFDI

SEQ ID NO: 23316-23317 - skipped (2 entries)

SEQ ID NO: 23318 - protein, 714 aa, Artificial Sequence
  Sunthetic Polypeptide
MALPVTALLLPLALLLHAARPDIQLTQSPDSLAVSLGERATINCKSSQSVLYSSINKNYLAWYQQKPGQPPKLLIYWASTRESGVPDRFSGSGSGTDFTLTISSLQAEDVAVYYCQQYYSTPYTFGQGTKVEIKGGGGSGGGGSGGGGSQMQLVQSGTEVKKPGESLKISCKGSGYGFITYWIGWVRQMPGKGLEWMGIIYPGDSETRYSPSFQGQVTISADKSINTAYLQWSSLKASDTAIYYCAGGSGISTPMDVWGQGTTVTVTRTTTPAPRPPTPAPTIASQPLSLRPEACRPAAGGAVHTRGLDFACDIYIWAPLAGTCGVLLLSLVITLYCKRGRKKLLYIFKQPFMRPVQTTQEEDGCSCRFPEEEEGGCELRVKFSRSADAPAYQQGQNQLYNELNLGRREEYDVLDKRRGRDPEMGGKPRRKNPQEGLYNELQKDKMAEAYSEIGMKGERRRGKGHDGLYQGLSTATKDTYDALHMQALPPRSSGSGEGRGSLLTCGDVEENPGPHMTEYKPTVRLATRDDVPRAVRTLAAAFADYPATRHTVDPDRHIERVTELQELFLTRVGLDIGKVWVADDGAAVAVWTTPESVEAGAVFAEIGPRMAELSGSRLAAQQQMEGLLAPHRPKEPAWFLATVGVSPDHQGKGLGSAVVLPGVEAAERAGVPAFLETSAPRNLPFYERLGFTVTADVEVPEGPRTWCMTRKPGA

SEQ ID NO: 23319 - protein, 856 aa, Artificial Sequence
  Synthetic Polypeptide
MALPVTALLLPLALLLHAARPDIQLTQSPDSLAVSLGERATINCKSSQSVLYSSINKNYLAWYQQKPGQPPKLLIYWASTRESGVPDRFSGSGSGTDFTLTISSLQAEDVAVYYCQQYYSTPYTFGQGTKVEIKLEDLKNVFPPEVAVFEPSEAEISHTQKATLVCLATGFYPDHVELSWWVNGKEVHSGVCTDPQPLKEQPALNDSRYCLSSRLRVSATFWQNPRNHFRCQVQFYGLSENDEWTQDRAKPVTQIVSAEAWGRADCGFTSESYQQGVLSATILYEILLGKATLYAVLVSALVLMAMVKRKDSRGRAKRSGSGATNFSLLKQAGDVEENPGPTSMDWIWRILFLVGAATGAHSFEQMQLVQSGTEVKKPGESLKISCKGSGYGFITYWIGWVRQMPGKGLEWMGIIYPGDSETRYSPSFQGQVTISADKSINTAYLQWSSLKASDTAIYYCAGGSGISTPMDVWGQGTTVTVTRIQNPDPAVYQLRDSKSSDKSVCLFTDFDSQTNVSQSKDSDVYITDKCVLDMRSMDFKSNSAVAWSNKSDFACANAFNNSIIPEDTFFPSPESSCDVKLVEKSFETDTNLNFQNLSVIGFRILLLKVAGFNLLMTLRLWSSRAKRSGSGVKQTLNFDLLKLAGDVESNPGPSRGHMTEYKPTVRLATRDDVPRAVRTLAAAFADYPATRHTVDPDRHIERVTELQELFLTRVGLDIGKVWVADDGAAVAVWTTPESVEAGAVFAEIGPRMAELSGSRLAAQQQMEGLLAPHRPKEPAWFLATVGVSPDHQGKGLGSAVVLPGVEAAERAGVPAFLETSAPRNLPFYERLGFTVTADVEVPEGPRTWCMTRKPGA

SEQ ID NO: 23320 - DNA, 312 bp, Artificial Sequence
  Synthetic Polynucleotide
gacggtaacgaggagatgggaggaatcactcaaaccccttacaaagtctcaatttcaggaacaactgttatccttacatgtccccagtatcctggcagcgagatcctttggcagcataacgacaagaatatagggggagatgaagacgataagaatatcggatctgacgaggatcacttgagcctgaaagagttctccgagcttgaacaaagcggatattatgtgtgctatccgcgcgggtcaaagccggaagacgctaacttttacctttatctccgagccagagtgtgcgaaaattgcatggaaatggac

SEQ ID NO: 23321 - DNA, 252 bp, Artificial Sequence
  Synthetic Polynucleotide
ttcaagatccccatcgaggaactggaagatcgggtgttcgtgaactgcaacacctctatcacctgggtggaaggcaccgtgggaacactgctgagcgacatcaccagactggacctcggcaagcggattctggaccctcggggcatctacagatgcaacggcaccgacatctacaaggacaaagaaagcaccgtgcaggtccactacagaatgtgccagtcctgcgtggaactggaccctgctacagtggcc

SEQ ID NO: 23322 - DNA, 282 bp, Artificial Sequence
  Synthetic Polynucleotide
cagagcatcaagggcaaccacctggtcaaggtgtacgactaccaagaggacggcagcgtgctgctgacatgtgatgccgaggccaagaacatcacctggtttaaggacggcaagatgatcggcttcctgaccgaggacaagaagaagtggaacctgggcagcaacgctaaggaccccagaggcatgtatcagtgcaagggcagccagaacaagagcaagcccctccaggtgtactaccggatgtgccagaactgcatcgagctgaacgccgctaccatcagc

SEQ ID NO: 23323 - DNA, 78 bp, Artificial Sequence
  Synthetic Polynucleotide
gttatgtccgttgctacaatagttatcgtagatatatgcatcacgggtggactgcttctgctggtttattattggtcc

SEQ ID NO: 23324 - DNA, 63 bp, Artificial Sequence
  Synthetic Polynucleotide
ggcatcatcgtgaccgatgtgatcgctactctgctgctggctctgggagtgttctgcttcgcc

SEQ ID NO: 23325 - DNA, 48 bp, Artificial Sequence
  Synthetic Polynucleotide
ggctttctgttcgccgagatcgtgtccatcttcgtgctggccgtgggc

SEQ ID NO: 23326 - DNA, 165 bp, Artificial Sequence
  Synthetic Polynucleotide
aagaatagaaaggccaaagctaaacccgtgaccagaggcgctggcgcaggcggaaggcaaaggggacaaaacaaagaacggccaccaccagtgcaaaatccagattatgagcctattcggaaaggacagagggacctgtactctggcctgaatcagagaagaatc

SEQ ID NO: 23327 - DNA, 135 bp, Artificial Sequence
  Synthetic Polynucleotide
ggacacgaaacaggcagactgtctggcgctgccgatacacaggccctgctgagaaacgaccaagtgtatcagcccctgcgcgacagagatgatgcccagtattctcacctcggcggcaactgggctagaaacaag

SEQ ID NO: 23328 - DNA, 150 bp, Artificial Sequence
  Synthetic Polynucleotide
gtgtactttatcgctggacaggatggcgtgcggcagagcagagcttccgataagcaaaccctgctgcctaacgaccagctgtaccagcctctgaaggacagagaggacgaccagtacagccacctccagggcaatcagctgagaagaaac

SEQ ID NO: 23329 - protein, 104 aa, Artificial Sequence
  Synthetic Polypeptide
DGNEEMGGITQTPYKVSISGTTVILTCPQYPGSEILWQHNDKNIGGDEDDKNIGSDEDHLSLKEFSELEQSGYYVCYPRGSKPEDANFYLYLRARVCENCMEMD

SEQ ID NO: 23330 - protein, 84 aa, Artificial Sequence [sequence omitted]

SEQ ID NO: 23331 - protein, 94 aa, Artificial Sequence
  Synthetic Polypeptide
QSIKGNHLVKVYDYQEDGSVLLTCDAEAKNITWFKDGKMIGFLTEDKKKWNLGSNAKDPRGMYQCKGSQNKSKPLQVYYRMCQNCIELNAATIS

SEQ ID NO: 23332 - protein, 26 aa, Artificial Sequence
  Synthetic Polypeptide
VMSVATIVIVDICITGGLLLLVYYWS

SEQ ID NO: 23333 - protein, 21 aa, Artificial Sequence
  Synthetic Polypeptide
GIIVTDVIATLLLALGVFCFA

SEQ ID NO: 23334 - protein, 16 aa, Artificial Sequence
  Synthetic Polypeptide
GFLFAEIVSIFVLAVG

SEQ ID NO: 23335 - protein, 55 aa, Artificial Sequence; identical to SEQ ID NO: 11783
  Synthetic Polypeptide

SEQ ID NO: 23336 - protein, 45 aa, Artificial Sequence
  Synthetic Polypeptide
GHETGRLSGAADTQALLRNDQVYQPLRDRDDAQYSHLGGNWARNK

SEQ ID NO: 23337 - protein, 50 aa, Artificial Sequence
  Synthetic Polypeptide
VYFIAGQDGVRQSRASDKQTLLPNDQLYQPLKDREDDQYSHLQGNQLRRN

SEQ ID NO: 23338 - DNA, 3600 bp, Artificial Sequence
  Synthetic Polynucleotide
agaaatcttgtgcgcatgtgaggggctgtgggagcagagaaccactgggtgggaaattctaatccccaccctgctggaaactctctgggtggccccaacatgctaatcctccggcaaacctctgtttcctcctcaaaaggcaggaggtcggaaagaataaacaatgagagtcacattaaaaacacaaaatcctacggaaatactgaagaatgagtctcagcactaaggaaaagcctccagcagctcctgctttctgagggtgaaggatagacgctgtggctctgcatgactcactagcactctatcacggccatattctggcagggtcagtggctccaactaacatttgtttggtactttacagtttattaaatagatgtttatatggagaagctctcatttctttctcagaagagcctggctaggaaggtggatgaggcaccatattcattttgcaggtgaaattcctgagatgtaaggagctgctgtgacttgctcaaggccttatatcgagtaaacggtagcgctggggcttagacgcaggtgttctgatttatagttcaaaacctctatcaatgagagagcaatctcctggtaatgtgatagatttcccaacttaatgccaacataccataaacctcccattctgctaatgcccagcctaagttggggagaccactccagattccaagatgtacagtttgctttgctgggcctttttcccatgcctgcctttactctgccagagttatattgctggggttttgaagaagatcctattaaataaaagaataagcagtattattaagtagccctgcatttcaggtttccttgagtggcaggccaggcctggccgtgaacgttcactgaaatcatggcctcttggccaagattgatagcttgtgcctgtccctgagtcccagtccatcacgagcagctggtttctaagatgctatttcccgtataaagcatgagaccgtgacttgccagccccacagagccccgcccttgtccatcactggcatctggactccagcctgggttggggcaaagagggaaatgagatcatgtcctaaccctgatcctcttgtcccacagatgtgaagcagaccctgaatttcgacctgctgaagctggctggcgacgtggaatccaacccaggccctatggccttaccagtgaccgccttgctcctgccgctggccttgctgctccacgccgccaggccgcagctccagctgcaagagtctggacctggcctggtcaagcctagcgagacactgagcctgacctgtaccgtgtccggcgatagcatcagcagcggcgattactactggggctggatcagacagcctcctggcaaaggactggaatggatcggccacatctactacagcggcgtgacctactacaaccccagcctgaagtccagagtgaccatcagcgtggacaccagccggaaccagttctccctgaagctgtctagcgtgacagccgccgataccgccgtgtactactgcaccagagaggacagcagcaactggcggagtagaggccagggaacactggtcacagttagctctctcgagagcggcggaggcggatctttcgaagaggttcagctgcttgagtctggcggaggactggttcaacctggcggaagcctgagactgtcttgtgccgccagcggcttcacctttagcagctacgccatgagctgggtccgacaggctcctggcaaaggactggaatgggtgtccagcatcagcggcagcggcgactacatctactacgccgatagcgtgaagggcagattcaccatcagccgggacatcagcaagaacaccctgtacctccagatgaacagcctgagagccgaggacaccgccgtgtactactgtgccaaagaaggcaccggcgctaacagcagcctggccgattatagaggccagggcacactggtcaccgtgtctagtacgcgtgggtctggaggcggaggcagcggcggaggcgggagcggcgacggtaacgaggagatgggaggaatcactcaaaccccttacaaagtctcaatttcaggaacaactgttatccttacatgtccccagtatcctggcagcgagatcctttggcagcataacgacaagaatatagggggagatgaagacgataagaatatcggatctgacgaggatcacttgagcctgaaagagttctccgagcttgaacaaagcggatattatgtgtgctatccgcgcgggtcaaagccggaagacgctaacttttacctttatctccgagccagagtgtgcgaaaattgcatggaaatggacgttatgtccgttgctacaatagttatcgtagatatatgcatcacgggtggactgcttctgctggtttattattggtccaagaatagaaaggccaaagctaaacccgtgaccagaggcgctggcgcaggcggaaggcaaaggggacaaaacaaagaacggccaccaccagtgccaaatccagattatgagcctattcggaaaggacagagggacctgtactctggcctgaatcagagaagaatctgaccagacatgataagatacattgatgagtttggacaaaccacaactagaatgcagtgaaaaaaatgctttatttgtgaaatttgtgatgctattgctttatttgtaaccattataagctgcaataaacaagttaacaacaacaattgcattcattttatgtttcaggttcagggggaggtgtgggaggttttttaaagcaagtaaaacctctacaaatgtggtatggaattaattctaaaatacagcatagcaaaactttaacctccaaatcaagcctctacttgaatccttttctgagggatgaataaggcataggcatcaggggctgttgccaatgtgcattagctgtttgcagcctcaccttctttcatggagtttaagatatagtgtattttcccaaggtttgaactagctcttcatttctttatgttttaaatgcactgacctcccacattccctttttagtaaaatattcagaaataatttaaatacatcattgcaatgaaaataaatgttttttattaggcagaatccagatgctcaaggcccttcataatatcccccagtttagtagttggacttagggaacaaaggaacctttaatagaaattggacagcaagaaagcgagcttctagcttatcctgtatatcacagacaaaactgtgctagacatgaggtctatggacttcaagagcaacagtgctgtggcctggagcaacaaatctgactttgcatgtgcaaacgccttcaacaacagcattattccagaagacaccttcttccccagcccaggtaagggcagctttggtgccttcgcaggctgtttccttgcttcaggaatggccaggttctgcccagagctctggtcaatgatgtctaaaactcctctgattggtggtctcggccttatccattgccaccaaaaccctctttttactaagaaacagtgagccttgttctggcagtccagagaatgacacgggaaaaaagcagatgaagagaaggtggcaggagagggca

SEQ ID NO: 23339 - DNA, 4275 bp, Artificial Sequence
  Synthetic Polynucleotide
agaaatcttgtgcgcatgtgaggggctgtgggagcagagaaccactgggtgggaaattctaatccccaccctgctggaaactctctgggtggccccaacatgctaatcctccggcaaacctctgtttcctcctcaaaaggcaggaggtcggaaagaataaacaatgagagtcacattaaaaacacaaaatcctacggaaatactgaagaatgagtctcagcactaaggaaaagcctccagcagctcctgctttctgagggtgaaggatagacgctgtggctctgcatgactcactagcactctatcacggccatattctggcagggtcagtggctccaactaacatttgtttggtactttacagtttattaaatagatgtttatatggagaagctctcatttctttctcagaagagcctggctaggaaggtggatgaggcaccatattcattttgcaggtgaaattcctgagatgtaaggagctgctgtgacttgctcaaggccttatatcgagtaaacggtagcgctggggcttagacgcaggtgttctgatttatagttcaaaacctctatcaatgagagagcaatctcctggtaatgtgatagatttcccaacttaatgccaacataccataaacctcccattctgctaatgcccagcctaagttggggagaccactccagattccaagatgtacagtttgctttgctgggcctttttcccatgcctgcctttactctgccagagttatattgctggggttttgaagaagatcctattaaataaaagaataagcagtattattaagtagccctgcatttcaggtttccttgagtggcaggccaggcctggccgtgaacgttcactgaaatcatggcctcttggccaagattgatagcttgtgcctgtccctgagtcccagtccatcacgagcagctggtttctaagatgctatttcccgtataaagcatgagaccgtgacttgccagccccacagagccccgcccttgtccatcactggcatctggactccagcctgggttggggcaaagagggaaatgagatcatgtcctaaccctgatcctcttgtcccacagatgtgaagcagaccctgaatttcgacctgctgaagctggctggcgacgtggaatccaacccaggccctatggccttaccagtgaccgccttgctcctgccgctggccttgctgctccacgccgccaggccggacgtggtcatgacacagagcccttctagcctgtctgccagcgtgggcgacagagtgaccatcacctgtatggcctccgaggacatctacatccggctggcctggtatcagcagaagcctggaaacgcccctaagctgctgatctacgccgccacctctctggaaacaggcgtgccaagcagattttccggcagcggctctggcaccgatttcaccctgacaatatccagcctccagcctgaggacttcgccacctactactgccagcagtattggagcagcccctggacatttggcggaggcaccaaggtggaaatcaaaggcggaggcggaagtggaggcggaggatctggcggcggaggctctcaggttcagctgcaagagtctggccccggactggtcaagcctagccaaacactgagcctgacctgtaccgtgtccggctacagcatcaccagcgactacacctggaactggatcagacagcctcctggcaacggactggaatggatcggctacatcacctacagcggcagcaccagctacaaccccagcctgaaaagccgggtgctgatctccgtggacaccagcaagaatcaggtgtccctgaagctgagcagcgtgacagccgctgataccgccgtgtactactgtgccagactggggagaagatacacaatggactactggggccagggcaccaccgtgacagtttcttctacgcgtgacggtaacgaggagatgggaggaatcactcaaaccccttacaaagtctcaatttcaggaacaactgttatccttacatgtccccagtatcctggcagcgagatcctttggcagcataacgacaagaatatagggggagatgaagacgataagaatatcggatctgacgaggatcacttgagcctgaaagagttctccgagcttgaacaaagcggatattatgtgtgctatccgcgcgggtcaaagccggaagacgctaacttttacctttatctccgagccagagtgtgcgaaaattgcatggaaatggacgttatgtccgttgctacaatagttatcgtagatatatgcatcacgggtggactgcttctgctggtttattattggtccaagaatagaaaggccaaagctaaacccgtgaccagaggcgctggcgcaggcggaaggcaaaggggacaaaacaaagaacggccaccaccagtgccaaatccagattatgagcctattcggaaaggacagagggacctgtactctggcctgaatcagagaagaatcagggccaagcgatctggatctggagcaacaaacttctcactactcaaacaagcaggtgacgtggaggagaatcccgggccttctagtatggactggatttggcgcatccttttccttgtcggcgctgctaccggcgcgcattccttcgaaggcggactcgagatccagaaccctgatcctgccgtgtaccagctgcgggatagcaagagcagcgacaagagcgtgtgtctgttcaccgacttcgacagccagaccaacgtgtcccagagcaaggactccgacgtgtacatcaccgataagaccgtgctggacatgcggagcatggacttcaagagcaactccgccgtggcctggtccaacaagtccgatttcgcctgcgccaacgccttcaacaacagcattatccccgaggacacattcttcccaagccccgagagcagctgcgacgtgaagctggtggaaaagagcttcgagacagacaccaacctgaacttccagaacctgagcgtgatcggcttcagaatcctgctgctgaaagtggccggctttaacctgctgatgaccctgcggctgtggtccagctgaccagacatgataagatacattgatgagtttggacaaaccacaactagaatgcagtgaaaaaaatgctttatttgtgaaatttgtgatgctattgctttatttgtaaccattataagctgcaataaacaagttaacaacaacaattgcattcattttatgtttcaggttcagggggaggtgtgggaggttttttaaagcaagtaaaacctctacaaatgtggtatggaattaattctaaaatacagcatagcaaaactttaacctccaaatcaagcctctacttgaatccttttctgagggatgaataaggcataggcatcaggggctgttgccaatgtgcattagctgtttgcagcctcaccttctttcatggagtttaagatatagtgtattttcccaaggtttgaactagctcttcatttctttatgttttaaatgcactgacctcccacattccctttttagtaaaatattcagaaataatttaaatacatcattgcaatgaaaataaatgttttttattaggcagaatccagatgctcaaggcccttcataatatcccccagtttagtagttggacttagggaacaaaggaacctttaatagaaattggacagcaagaaagcgagcttctagcttatcctgtatatcacagacaaaactgtgctagacatgaggtctatggacttcaagagcaacagtgctgtggcctggagcaacaaatctgactttgcatgtgcaaacgccttcaacaacagcattattccagaagacaccttcttccccagcccaggtaagggcagctttggtgccttcgcaggctgtttccttgcttcaggaatggccaggttctgcccagagctctggtcaatgatgtctaaaactcctctgattggtggtctcggccttatccattgccaccaaaaccctctttttactaagaaacagtgagccttgttctggcagtccagagaatgacacgggaaaaaagcagatgaagagaaggtggcaggagagggcacgtggcccagcctcagtctctccaactgagttcctgcctgcctgcctttgctcagactgtttgccccttactgctcttctaggcctcattctaagccccttctccaagttgcctctccttatttctccctgtctgccaaaaaatctttcccagctcact

SEQ ID NO: 23340 - DNA, 516 bp, Artificial Sequence
  Synthetic Polynucleotide
atggactggatttggcgcatccttttccttgtcggcgctgctaccggcgcgcattccttcgaaggcggaacgcgtttcgaaggcggactcgagatccagaaccctgatcctgccgtgtaccagctgcgggatagcaagagcagcgacaagagcgtgtgtctgttcaccgacttcgacagccagaccaacgtgtcccagagcaaggactccgacgtgtacatcaccgataagaccgtgctggacatgcggagcatggacttcaagagcaactccgccgtggcctggtccaacaagtccgatttcgcctgcgccaacgccttcaacaacagcattatccccgaggacacattcttcccaagccccgagagcagctgcgacgtgaagctggtggaaaagagcttcgagacagacaccaacctgaacttccagaacctgagcgtgatcggcttcagaatcctgctgctgaaagtggccggctttaacctgctgatgaccctgcggctgtggtccagctga

SEQ ID NO: 23341 - DNA, 615 bp, Artificial Sequence
  Synthetic Polynucleotide
atggactggatttggcgcatccttttccttgtcggcgctgctaccggcgcgcattccttcgaaggcggaacgcgtgaggacctgaagaacgtgttcccacctgaggtggccgtgttcgagcctagcgaggccgagatcagccacacccagaaagccaccctcgtgtgcctggctaccggcttctaccccgaccatgtggaactgtcttggtgggtcaacggcaaagaggtgcacagcggcgtgtctaccgacccccagccactgaaagaacagcccgccctgaacgacagccggtactgcctgagcagcagactgagagtgtccgccaccttctggcagaacccccggaaccacttcagatgccaggtgcagttctacggcctgagcgagaacgacgagtggacccaggacagagccaagcccgtgacccagatcgtgtctgccgaagcctggggcagagccgattgcggctttaccagcgagagctaccagcagggcgtgctgagcgccaccatcctgtacgagatcctgctgggcaaggccaccctgtacgccgtgctggtgtctgccctggtgctgatggctatggtcaagcggaaggacagccggggatga

SEQ ID NO: 23342 - DNA, 612 bp, Artificial Sequence
  Synthetic Polynucleotide
atggactggatttggcgcatccttttccttgtcggcgctgctaccggcgcgcattccttcgaaggcggaacgcgtttcgaaggcggactcgaggacaagcagctggacgccgacgtgtcccccaagcctaccatcttcctgccctctatcgccgagacaaagctccagaaggccggcacctacctgtgcctgctggaaaagttcttcccagatgtgattaagatccactggcaggaaaagaagtccaacaccatcctgggcagccaggaaggcaacaccatgaagaccaacgacacctacatgaagttcagctggctgaccgtgcccgagaagtccctggacaaagaacacagatgcatcgtgcggcacgaaaacaacaagaacggcgtggaccaggaaatcatcttcccacccatcaagaccgatgtgattacaatggaccccaaggacaactgctccaaggacgccaacgataccctgctgctccagctgaccaacaccagcgcctactacatgtacttgttgctgctgctgaagtccgtggtgtacttcgccatcatcacatgctgcctgctgcggagaaccgccttctgctgcaacggcgagaagtct

SEQ ID NO: 23343 - DNA, 552 bp, Artificial Sequence
  Synthetic Polynucleotide
atggactggatttggcgcatccttttccttgtcggcgctgctaccggcgcgcattccttcgaaggcggaacgcgtttcgaaggcggactcgagagccagcctcacaccaagcccagcgtgttcgtgatgaagaacggcaccaacgtggcctgcctcgtgaaagagttctaccccaaggacatcaggatcaacctggtgtccagcaagaagatcaccgagttcgaccccgccatcgtgatctcccccagcggcaagtacaacgccgtgaagctggggaagtacgaggacagcaacagcgtgacctgctccgtgcagcacgacaacaagaccgtgcacagcaccgactttgaagtgaaaaccgactccaccgaccacgtgaagcccaaagagacagagaacaccaagcagcccagcaagagctgccacaagcccaaggccatcgtgcacaccgagaaagtgaacatgatgagcctgaccgtgctgggcctgcggatgctgttcgccaaaaccgtggccgtgaacttcctgctgaccgccaagctgttcttcctc
